(19) United States
(12) Patent Application Publication
(10) Pub. No.: US 2008/0311567 A1
(43) Pub. Date: Dec. 18, 2008

(54) Tumor Markers for Use in the Diagnosis of Colorectal Carcinomas and/or Metastases Originating Therefrom

(75) Inventors: Wolfgang Michael Bruckl, Buckenhof (DE); Axel Wein, Erlangen (DE); Marc Munnes, Erkrath (DE); Ralph Markus Wirtz, Cologne (DE)

Correspondence Address: SIEMENS CORPORATION;INTELLECTUAL PROPERTY DEPARTMENT, 170 WOOD AVENUE SOUTH, ISELIN, NJ, 08830, US

(73) Assignee: FRIEDRICH-ALEXANDER- UNIVERSITAT ERLANGEN- NURNBER, Erlangen (DE)

(21) Appl. No.: 11/659,250

(22) PCT Filed: Jul. 29, 2005
(86) PCT No.: PCT/EP05/08274

§ 371 Date: Apr. 15, 2008

(30) Foreign Application Priority Data
Aug. 4, 2004 (DE) 10 2004 037 860.6

(51) Int. Cl. C12Q 1/68

(52) U.S. Cl. 435/6

(57) ABSTRACT

The invention relates to a method (i) for detecting a carcinoma, especially an adenocarcinoma, preferably a gastrointestinal carcinoma and more preferably a colorectal carcinoma, (ii) for predicting metastases, preferably liver metastases, depending on a primary colon carcinoma and/or (iii) for predicting the response of metastases to a 5-fluorouracil-containing chemotherapy. The inventive method comprises determining a gene expression profile of 120 marker genes or a selection thereof.

[0001] The invention relates to a method (i) for detecting a carcinoma, especially an adenocarcinoma, preferably a gastrointestinal carcinoma and more preferably a colorectal carcinoma, (ii) for predicting metastases, preferably liver metastases dependent on a primary colon carcinoma and/or (iii) for predicting the response of metastases to a 5-fluorouracil-containing chemotherapy, which method comprises determining a gene expression profile of 120 marker genes or a selection thereof. The 120 genes are defined by their sequences, as represented in SEQ ID NOs: 1-181. Also disclosed are kits for carrying out the method of the invention and diagnostic kits. Additional embodiments of the invention relate to the use of the marker genes disclosed herein and/or the combinations of marker genes disclosed herein. Furthermore, the invention relates to the use of non-human mammals or cells cultured therefrom, whose hereditary material was attached in reference to one or more of the genes indicated in this method. The non-human mammals or the cultured cells whose hereditary material was attached can be used particularly for tests of alternative therapies or therapeutics in reference to primary colorectal carcinomas and metastases derived therefrom.

[0002] Colorectal carcinomas represent the third most frequent tumor entity in western countries. In Germany, approximately 50,000 patients fall ill with colorectal carcinomas per year. Annually, in approximately 20,000 patients with colorectal carcinoma, lung or liver metastases occurred synchronously or metachronously. From the technical point of view, in Germany, a curative metastasis resection (RO) which is associated with a 5-year survival rate of approximately 30% is possible in approximately 4,000 of the 20,000 patients with distant metastases.

[0003] In the remaining 16,000 patients, a resection is not possible for a great variety of reasons (multimodular, unfavorable localization on vessels and bile ducts, ektrahepatic). In these cases, palliative therapy options are indicated. The purpose of the palliative treatment, in addition to maintaining a good quality of life, is to increase the survival time. Currently many therapeutic regimens based on 5-FU/folic acid are available. A response rate of approximately 40% can be achieved, without adding additional substances. In several studies, the combination of 5-FU/folic acid with irinotecan or oxaliplatin led to an improvement of the response rate up to 50% of the patients treated. In addition, additional substances are now being tested in the palliative therapy of colorectal carcinoma, such as, for example, antibodies against VEGR and EGF-R or so-called “small molecules” against the tyrosine kinase domain of VEGF-R or EGF-R. At this time, the final usefulness of these new substances will not be determined until additional investigations are carried out in the context of a preclinical trial and clinical phase I-III studies. Owing to the multitude of relevant study results produced with different regimens, no generally accepted standard regimen can be indicated for the first treatment.

[0004] The response to the therapy is evaluated according to the WHO guidelines (World Health Organization. Handbook for Reporting Results of Cancer Treatment. WHO Offset Publication No. 48. Geneva: WHO 1979). Patients who present a complete remission (CR, complete remission) or a partial remission (PR, partial remission) in imaging procedures are called “responders,” while patients who present a stable tumor course (SD, stable disease) or a progressive tumor course (PD, progressive disease) in imaging are called “non-responders.” In colorectal carcinoma, response to the chemotherapy correlates with the survival of the patients. The factors which can predict the response to chemotherapy are called predictive markers. an individualized therapy could be made available based on predictive markers. In spite of numerous investigations of various types in this field, the molecular predictive markers described in the literature to date are not sufficient for metastasized colorectal cancer.

[0005] Watson (2003) Clin. Sci. 104:537-545 shows in a genotyping study that polymorphisms of the apolipoprotein E gene influence the risk of falling ill with colorectal carcinoma. According to the investigation, persons with a ε2/ε2 genotype, in contrast to the widespread ε3/ε3 genotype, present an elevated risk of falling ill with colorectal carcinoma, with a clear gender specificity in reference to the disease. Sladek (2002) Cancer chemother. Pharmacol. 49:309-321 and Sreerama (2001) Cancer Chemother. Pharmacol. 47:255-362 point out the possibility of using the determination of the cellular level of expression of the aldehyde dehydrogenases ALDH1A1 and ALDH3A1 to predict the response of breast cancer to a cyclophosphamide- (or other oxazaphosphorines, for example: ifosfamide)-based chemotherapy. Kemmner (1994) Clin. Exp. Metastasis 12:245-254 states that in human colorectal tumors the expression of two sialyl transferases is elevated compared to normal tissue, and that a quantitative determination of the specific sialyl transferase activity could therefore be suitable for detecting and monitoring colon carcinoma. Sotiropoulou (2002 Mol. Med. 8:42-55 identifies a new sialyl transferase gene (SIATL1) whose expression is downregulated in human breast tumor tissue cell lines in comparison to normal breast tissue cell lines. The abnormal expression and enzymatic activity of sialyl transferases in tumor cells leads to the formation of tumor-associated carbohydrate antigens which can be used, particularly in immunotherapy. Dolnick (1996) Advan. Enzym Regul. 36:165-180 and Dolnick (1996) Cancer Res. 56:3207-3210 detect two gene products of the rThymidylate synthase genes, called rTSoα and rTSβ. In the two cell lines H630-1 and H630-10, modified thymidylate synthase activity is observed. In cell lines, Maxwell (2003) Cancer Res. 63:4602-4606 detects a change in the gene expression in 619 genes using the DNA-microchip technology. The investigations were carried out on MCF-7 breast cancer cells, as well as on H630- and H630-R10 colon carcinoma cell lines. An expression-activating effect of 5-FU and an elevated expression of the spermin/spermidine acetyltransferase genes, of the annexin II genes, of the thymosin β-10 genes, of the chaperonin-10 gene and, particularly, of the MAT-8 genes are described. Biran (1986) Clin. Pathol. 39:794-797, in a study of 160 lung cancer patients, measures the concentration of the serum amyloid A and indicates that an active disease is connected with a high titer in comparison to the inactive stage of the disease. Serial investigations produced a good agreement between the change in the serum amyloid A concentration and the clinical course. Bruno (2003) Clin. Cancer Res. 9:1077-1082 investigated 180 lung cancer patients (NSLCL [sic; NSCLC]) and claims that α₁-acidic glycoprotein is a protein for predicting treatment effects in lung cancer patients. O'Hanlon (2002) Anticancer Res. 22:1289-1293, in a study of acute phase proteins, detects concentrations of C-reactive protein and of serum amyloid A in 92 patients with breast cancer and 31 patients with benign breast tissue change. Serial investigations yielded significantly higher concentrations of the two proteins in patients in UICC [International Union Against Cancer] stage IV, and particularly in T4 ulcerating tumors. Simpson (1995) Clin. Exp. Immunol. 99:143-147 treated 24 patients who suffered from metastasizing colorectal carcinoma with a combination therapy consisting of recombinant interleukin 2 (rIL-2), followed by 5-fluorouracil and folic acid. The therapy course was investigated by measuring the concentrations of C-reactive protein, retinol binding protein, alpha 1-antitrypsin, transferrin and albumin. Only 7 of the 24 patients responded to the rIL-2 based therapy. In 67 patients with colorectal carcinoma, Glojnaric (2001) Clin. Chem. Lab. Med. 39:129-133 determined the concentrations of serum amyloid A protein, C-reactive protein, α₁-antichymotrypsin and α₁-acidic glycoprotein at 12 times (before the operation, after the operation, and before 9 chemotherapy cycles that are not specified in greater detail). Of the four acute phase proteins investigated, the serum amyloid A protein was found to present the highest specificity and sensitivity. Therefore, the author proposes only the serum amyloid A protein as a reliable, nonspecific tumor marker for colorectal carcinoma in daily clinical practice. McMillan (2003) Br. J. Surg. 90:215-219 investigated a change in the concentration of the C-reactive protein in 174 patients with colorectal carcinoma before and after the resection. The author observed that the validity of this parameter is low. Koeffler (2003) Clin. Cancer Res. 9:1-9 describes the different views that exist regarding the connection between the peroxisome proliferative activated receptor-γ (PPAR_{γ}) and cancer. The gene is activated only by the binding of a ligand. Some research results suggest that PPAR_{γ} functions as tumor suppressor, whereas other research results on murine models support the notion that PPAR_{γ} ligands promote the formation of cancer under certain conditions. Gupta (2002) Am. J. Physiol. Gastrointest. Liver Physiol. 283:G266-G269 investigated the question whether an activation of the peroxosome proliferative activated receptor-γ (PPAR_{γ}) accelerates or decreases the growth of colorectal carcinomas, because an activation of the peroxosome proliferative activated receptor-γ (PPAR_{γ}) has a negative influence, due to ligand binding, on the proliferation of cultured colorectal cancer cells or of colorectal carcinomas in the murine model. In 81 patients with metastasizing malignant melanoma and in 50 normal volunteers, Mouawad (2002) Melanoma Res. 12:343-348 determined the expression level of caspase-1 in order to establish a correlation between this enzyme which participates in apoptotic processes and the pathological condition of the patient.

[0006] The patients received cisplatin, recombinant interleukin-2, and α-interferon. The average caspase-1 level in melanoma patients was clearly above that of the control group. De Vita (1993) Eur. J. Cancer 29:887-893 describes some Hox genes in primary colon tumors and derived hepatic metastases which present an elevated expression level, which suggested a connection between this gene and the growth of the colon tumors. Kawazoe (2002) Develop. Growth Differ. 44:77-84, in in-situ hybridization studies, demonstrated the expression of different Hox genes on postembryonic day 12.5 in the intestine of the mouse. For the genes of the HoxD gene, they demonstrated the expression of HoxD-4, HoxD-8 and HoxD-9 in reference to expression in the colon. Nunes (2003) Pesqui. Odontol. Bras. 17:94-98, combined the results of the current literature to formulate the thesis that there are many connections between normal development and tumor formation. Cillo (1994-95) Invasion Metastasis 14, 38-39 investigated the expression pattern of the Hox gene in healthy human organs, in kidney and colon tumors, small cell bronchial carcinomas (SCLC [small cell lung cancer]), and metastasizing variants. He arrives at the result that Hox genes function as a network for the regulation of transcription and participate in the processes of cell-to-cell communication during normal morphogenesis. Wang (2002) Cancer Letters 179:71-77 compared the expression of the CASK and Reelin genes in human gastric, colon and esophageal carcinomas by RT-PCR, immunohistochemical methods, and western blot analysis. In 87.5% of the esophageal carcinomas investigated, an elevated expression of the CASK and Reelin genes was found in comparison to the healthy esophageal tissue. In 50% of the gastric carcinomas and 64.3% of the colon carcinomas, an increase in the CASK expression level compared to the normal tissue was demonstrated, whereas the Reelin level underwent no change. The author arrives at the result that the CASK gene is involved in the tumorogenesis of the esophagus by influencing the transcription of the Reelin genes. Nevertheless, the exact function of the CASK gene and the Reelin gene and their mutual interaction still remain unclear. Kuno (1997) JBC 272:556-562 reports on ADAMTS-1 from the ADAM gene family. Investigations showed that the intravenous administration of lipopolysaccharides to mice activates the transcription of the ADAMTS-1 genes selectively in the kidney and the heart. From these results, the authors concluded that the ADAMTS-1 gene participates in different inflammatory processes, as well as in the development of tumor-related cachexia. Iruela-Arispe (2003) Ann. NY Acad. Sci. 995:183-190 isolated a secreted metalloproteinase (METH1/ADAMTS1) and showed that in vitro it inhibits the growth of endothelial cells and in vivo blocks the neovascular response induced by growth factors. The authors found indications that two domains of the protein are needed to develop the antiangiagenesis/antitumor activity of ADAMTS1. Rathnakumar (2000) Indian J. Cancer. 37:23-26 points out that numerous biochemical tests are carried out for diagnosing liver metastases before and after surgery. However, the value of these biochemical methods has decreased following the recent introduction of high-resolution imaging procedures such as computer tomography or ultrasonography. Different biochemical markers have been proposed for identifying liver metastases, and in this study the author argues in favor determining the 5′-nucleotidase content because he considers this gene the most sensitive marker for liver metastases. Eroglu (2000) Med. Oncol. 17:319-324 contends that close attention should be paid to enzymatic studies for the characterization of colorectal tumors, and that little is known on the connection between the level of the key enzymes of the purinenucleotide signal pathway and some clinical and biological indicators of invasiveness and aggression of tumors. In his study, the author determined the content of adenosine deaminase (ADA) and 5′-nucleotidase (5′-NT) in healthy tissue and in tumor tissue of 38 patients with colorectal carcinoma. The result of the study was that the enzyme content in the primary tumor is clearly higher than that in the normal mucosa. Galmarini (2002) Brit. J. Haematol. 117:860-868 investigated the resistance mechanism against cytarabine in acute myeloid leukemia (AML). He observed that the expression of 5′-nucleotidase, HENT1 and DNA polymerase a at the time of the diagnosis causes cytarabine resistance in patients with acute myeloid leukemia. Wiksten (2003) Oncology 64:245-250 investigated the expression of tenascin-C in the connective tissue of 314 gastric carcinoma patients in an immunohistochemical study. Tenascin-C is an extracellular hexameric matrix glycoprotein which is expressed during embryonic development and in proliferative processes such as wound healing or tumorogenesis. The author discovered that it appears that the tenascin-C expression correlates with the survival of patients with stomach cancer, but does not provide significant prognostic information. Riedl (1995) Int. J. Cancer 64:65-69, in a study of 118 patients with colorectal carcinoma and a control group of 51 healthy persons, determined the serum content of tenascin. It was found that patients with colorectal carcinoma present a significantly higher serum level of tenascin than the control group. In addition, it was shown that, in patients with distant metastases, the serum level of tenascin is clearly higher than that of patients without distant metastases. Emoto (2001) Cancer 92:1419-1426, in a study, investigated the correlation of the overexpression of annexin II and tenascin-C in colorectal carcinomas. Using immunohistochemical methods, he measured the expression of both genes in 105 primary colorectal tumors. The results show that both annexin II and tenascin-C are overexpressed in advanced colorectal carcinomas. Gu (2004) Int. J. Oncol 24:671-678, in a study, investigated the question whether the expression of IMP-1, -2 and -3 in ovarian epithelial tumors is connected with the survival rate of the patients. For this purpose, the expression level of the IMP gene was determined with a semiquantitative PCR procedure in 59 ovarian epithelial carcinomas and 7 normal ovaries. Expression of the IMP gene was observed in all the tumor tissues investigated, including cancer of the breast, lung, colon, prostate and ovary, but not cancer of the pancreas. Riede (1998) Langenbecks Arch. Chir. Suppl. Kongressbd. 115:299-302 analyzed the expression and the regulation of the expression of the MUC2 gene in normal colon tissue, colon carcinoma tissue and metastasis tissue. The author noted that the MUC2 expression was significantly lower in metastases than in the normal mucosa and in the primary tumor, and was apparently not connected with the normal metastasis process. Manne (2000) Clin. Canc. Res. 6:4017-4025 investigated the prognostic value of the correlation between the expression of the MUC1 and MUC2 gene in colorectal adenocarcinomas and the aggressiveness of the colorectal adenocarcinoma in reference to the differences within the population. The expression of MUC1 and MUC2 was determined by immunohistochemical methods in 166 samples of colorectal adenocarcinoma, of which 58 were of Afro-American and 108 of Caucasian origin. No prognostic use of MUC2 for Caucasians or Afro-Americans was detected in this study. Akyurek (2002) Pathol. Res. Pract. 198:665-675 considered a possible connection between the MUC1 and MUC2 expression and the survival time of 143 gastric carcinoma patients. The author summarized his study with the result that the MUC1 expression represents a usable prognostic factor for predicting the survival probability of gastric carcinoma patients, whereas the role of the MUC2 expression remains unclear. Baba (2000) Cancer Res. 60:6886-6889 claims that the activation of the Ki-Ras signal pathway represents a factor which leads to the overexpression of epiregulin in human colon cancer cells. In addition, he is of the opinion that epiregulin plays a decisive role in vivo in tumorogenesis in humans. Dionigi (2000) Am. J. Clin. Path. 114:111-122, using immunostains, investigated 23 ovarian metastases of colorectal primary tumors and 23 primary ovarian carcinomas in order to establish criteria to allow the differential diagnosis of the two cancer types. In the immunostaining methods, antibodies against anti-gastric M1 antigen, CA125, vimentin, estrogen and progesterone receptors, cytokeratins 7 and 20, alpha-inhibin, and cathepsin E were used. The result of the study was that the immune reaction of cytokeratin 20 and the absence of an immune reaction against the anti-gastric M1 antigen, CA125 and cytokeratin 7 allow the differential diagnosis of ovarian metastases of colorectal primary tumors on the one hand and primary ovarian carcinomas on the other hand. DePrimo (2003) BMC Cancer 3:3 uses, in his study, a method based on a microarray to establish a tumor gene profile from a blood sample. In his investigations, he uses monocytes from the blood of 23 patients with advanced colorectal carcinoma who were in phase III clinical treatment with SU5416. During the course of the study, a screening was carried out to determine changes in the expression profile which were the result of the treatment with SU5416. The author identified 4 transcripts which are suitable for the classification of the patients according to the treatment method (CD24, lactoferrin, lipocallin [sic; lipocalin] 2 and MMP-9), but was unable to rule out with certainty that the altered expression of these 4 genes was also caused by the administration type or concomitant drugs. Mariadson (2003) Cancer Res. 63:8791-8812, in a study based on a microarray of 30 colon tumor cell lines, established an expression profile of 430 genes which provides valid information regarding the response of the tumor to different chemotherapeutic. In reference to the response of colon cancer to a 5-FU therapy, he focused his selection on 50 genes.

[0007] The prior art thus already makes available markers for various proliferative diseases. However, it is problematic to make available a reliable diagnosis which can lead to individual therapies, and particularly to higher response rates to therapeutic agents.

[0008] The technical problem is solved by provision of the embodiments disclosed herein, and particularly by the claims that characterize the invention.

[0009] The invention therefore comprises a method for

[0010] (a) detecting a colorectal carcinoma;

[0011] (b) prediction of metastases dependent upon a primary colorectal carcinoma; and/or

[0012] (c) prediction of the response, particularly of metastases, to a 5-FU containing therapy; comprising the determination of a gene expression profile of 120 marker genes (SEQ ID NO: 1 to SEQ ID NO: 181) or a selection therefrom.

[0013] The invention relates to the expression profiles of certain genes which are of significance in carcinomas, particularly adenocarcinomas, preferably in gastrointestinal carcinomas, and more preferably in primary colorectal carcinomas and metastases derived therefrom, preferably liver metastases. The content of the invention also relates to the advantage derived from the knowledge of this expression, and the preparation of expression profiles for the possible diagnosis, prognosis, prediction of the response to the therapeutic measures, particularly, for example, chemotherapy, and preferably a 5-FU-containing chemotherapy and/or combination therapy. Surprisingly, in this embodiment of the invention in particular, it is possible to use markers which are defined in the invention and which can be determined by the simplest of methods from/in body fluids such as blood or blood serum, but also, for example, (peritoneal) ascites or lymphatic fluid. Furthermore, the present invention can be used to observe the course of a therapy of carcinomas, particularly of primary colorectal carcinomas and metastases derived therefrom, preferably liver metastases.

[0014] The 120 genes (marker genes) of the invention are defined particularly in Table D, and they are represented by their corresponding coding sequence(s). Thus, the corresponding, individual (marker) genes are characterized partially by several SEQ ID NOs. The individual sequences of the 120 defined marker genes represent, for example, variants, particularly splice variants or genes with higher homology.

[0015] In connection with this invention, the expression “colorectal carcinoma” denotes particularly polypoid, plateau-shaped, ulcerating and flat (scirrhoid) forms which are classified histologically into solid, mucus-producing or glandular adenocarcinomas, signet ring cell carcinomas, squamous, adenosquamous, cribriform pavement epithelium-like or undifferentiated carcinomas according to the WHO classification (Becker, Hohenberger, Junginger, Schlag. Surgical Oncology. Thieme, Stuttgart 2002). As mentioned above, the methods according to the invention are not limited to colorectal carcinomas.

[0016] In connection with this invention, the term “adenocarcinoma” relates to a cancerous tumor which starts from an epithelial cell layer of the glandular portion of a mucous membrane. The adenocarcinoma represents a separate, morphologically clearly delimited part of the carcinomas.

[0017] The term “detection” of a carcinoma, particularly a colorectal carcinoma, comprises particularly the in vitro determination of a potential (colorectal) carcinoma. This detection is preferably an early detection. The term “early detection,” in connection with the invention, indicates that a (colorectal) carcinoma can be detected as early as possible in its genesis, development and/or symptomatic manifestation. “Early detection” therefore comprises the detection of (colorectal) carcinomas in an early stage of the disease, when the disease is still limited to the tumor, and no metastasizing into the lymph vessels/lymph nodes (L0, N0), other organs (M0), or vascular invasions (V0) have occurred, although it is not limited to that stage. “Early detection” relates, among other factors, to the diagnostic analysis in preventive care investigations, and also in routine investigations or follow-up investigations, for example, after the performance of the resection of an already present primary tumor.

[0018] The term “prediction,” in the context of this invention, denotes the determination of the biological, biomedical condition of tissue or individual cells, particularly the determination whether a given tissue/given cell has undergone a proliferative change. As part of this invention, a determination is made to establish whether a potential metastasis, preferably a liver metastasis, presents in fact a proliferative change and/or is in fact a secondary disease focus resulting from a primary proliferative and/or tumorigenic disease. In the context of the invention, the primary proliferative disease is preferably a colorectal carcinoma, and the secondary disease focus is a metastasis, preferably a liver metastasis.

[0019] The term “prediction,” in connection with the method according to the invention for determining the response of a tumor and particularly of metastases, again preferably liver metastases, to a 5-FU- (5-fluorouracil)-containing chemotherapy and/or combination therapy, includes the determination of a possible “responsiveness” or a “response” of a metastatic cell or a metastatic tissue to the therapy. Thus, “responsiveness” represents the induction of a reaction—which promotes the cure of a disease or disorder (in this context, a proliferative disease)—of a single cell, a cell population, a cell aggregate, a tissue, an organ or an organism. The term “responsiveness” comprises particularly the sensitivity of individual (proliferatively altered and/or metastatic) cells, a cell population or a cell aggregate/tissue to 5-FU alone or in combination with other drugs. The terms “responder” and “non-responder” are known to the person skilled in the art and have already been explained above. Patients are evaluated as “responders” if they present a complete remission (CR) or a partial remission (PR); patients who present a stable tumor course (SD, stable disease) or a progressive tumor course (PD, progressive disease) in the imaging are evaluated as “non-responders.” The response to the chemotherapy correlates with the survival of the patients in colorectal carcinoma. Factors that could predict the response to the therapy would lead to a recommendation of the therapy in the case of a “responder,” and to offering the patient existing therapy alternatives in the case of a “nonresponder.”

[0020] Here the “prognostic factor” and the “predictive factor” also play a role. In this case, the “prognostic factor” is a variable which has an independent influence on the disease course. Clinical, histopathological and molecular prognostic factors were evaluated in 2000 by the American Joint Committee on Cancer Prognostic Factors (AJCC) in colorectal carcinoma (Compton C. et al., Cancer 88:1739-57 (2000)). An unequivocal prognostic relevance was assigned to the pT category, the pN category, invasion of venous and lymphatic vessels, the residual tumor R classification, and to the preoperative CEA value. To date, the molecular markers are still not considered to have been sufficiently validated.

[0021] The “predictive factor” is a variable which has an independent influence on the response of a nonsurgical therapy. Here too, the molecular factors are not yet sufficiently validated for the prediction of a palliative chemotherapy in colorectal carcinoma.

[0022] It is preferred for the proliferatively attached (metastatic) cell/the cell aggregate to die and/or to be stopped in its proliferation as a result of the 5-FU therapy. A combination therapy with 5-FU comprises, among other steps, the additional administration to the patients of other drugs, which preferably are also cancer drugs. However, the drugs can also include, for example, immunostimulating drugs. Other drugs that can be used in cancer or chemotherapy are platinum compounds (such as, for example, cisplatin or oxaliplatin). The additional administration of, for example, folic acid is a combination therapy in the sense of this invention. In the examples, it is demonstrated that the invention described here can also be used particularly in the palliative first-line therapy where, in the specific example, 5-FU was used with oxaliplatin. The 5-fluorouracil (5-FU) based chemotherapy represents the most important pillar of the chemotherapy of colorectal carcinoma. Usually, folic acid is added for biomodulation. In the past, 5-FU was administered as a bolus (so-called Mayo regimen), but, in the meantime, studies have become available which show that if the therapy is administered as a 24-h infusion (so-called AIO [Working Group for Internal Oncology] regimen), it is tolerated considerably better, less diarrhea, mucositis and hand-foot syndrome occurs, and that the therapy is also has a better response. Other therapy options consist of treatment with the orally available 5-FU derivative Xeloda® (which is administered without folic acid) or the combination therapy with, for example, folic acid, irinotecan, cisplastin or oxaliplatin. Other combinations which are currently being tested in phase I-III studies are 5-FU-containing schemes in combination with, for example, cetuximab, erlotinib, bevacizumab or vatalanib.

[0023] The concept “metastases,” in connection with the above-mentioned method for predicting/determining the response to a therapy, preferably a 5-FU-containing chemotherapy and/or combination therapy, comprises “disseminated (tumor) cells” in the affected patient's body. The concept “metastases” comprises particularly, according to the invention, liver, lung, brain, bone and/or peritoneal metastases, and particularly liver metastases.

[0024] In connection with the invention, the concept “gene expression profile” comprises the determination of “expression profiles,” and also of “expression levels” [English] or “expression levels” [French] of the corresponding genes.

[0025] The concept “expression level” and the concept “expression profile,” according to the invention, comprise both the quantity of the expression product and the quality of the expression product, for example, products of alternate splicing processes, methylations, glycosylations, phosphorylations, etc. Thus, in the determination of the “expression profile,” in connection with the invention, the focus is essentially on the quantity of the corresponding gene product (RNA/protein). The expression level also takes quantity into account, but, if applicable, it is compared to other tissues, or to tissues and cells from other (preferably healthy) individuals. Optionally, modifications in the gene product (such as, for example, mutations) are also determined in comparison to other tissues. Corresponding embodiment examples are documented in the experimental part, and also particularly in the tables, preferably in Tables A, B and C.

[0026] In a particular embodiment, the invention comprises the above-mentioned method where the expression profile of at least two of the 120 marker genes, as represented in SEQ ID NO: 1 to SEQ ID NO: 181, is determined. As mentioned above, the 120 marker genes are also defined by variants, which again are represented in Table D. This expression profile is preferably compared with the expression profile of a “reference.” A reference can be, for example, the expression profile of healthy tissue (for example, intestinal tissue or tissue of the liver, lung, etc.). As “healthy tissue,” one can use here tissue of the affected individual (patient), if that tissue is known not to have undergone any proliferative change, or even be metastatic. Corresponding examples are represented in the experimental part of the invention. However, tissues of other individuals, preferably healthy individuals, can also be used as “reference” or “reference value.”

[0027] The determination of the expression profiles is carried out particularly in tissues and/or individual cells of the tissue. Single cell analyses are known in the state of the art and they also comprise DNA or RNA determinations; see, among other references, the detection of individual copies of individual genes as represented in Klein (1999) PNAS 96:4494-4499 or the determination of genomic imbalances as described, for example, in Solinas-Toldo (1997) Genes, Chromosomes, Cancer 20:399-407 genes. It is also possible to determine the expression profile of the genes (gene segments) represented therein by techniques such as in situ hybridization, the determination of the copy number of individual genes (DNA copy number) by comparative genomic hybridization. Other methods for determining the expression profile therefore comprise (in the sense of this invention) the determination by the PCR methodology and the use of biochips (see also the experimental part of the invention). As documented in the experimental part, the determination of the “expression profile” or the “expression level” comprises particularly the quantitative, optionally comparative, determination of the gene expression products, particularly of RNA (but also of proteins). For the determination of the expression profile of the gene (or gene segments) disclosed herein, the following methods can also be used: immunodetection of the proteinaceous gene product (for example, Western blot, ELISA techniques or immunodetection with microscopic analysis); biochemical determinations of the expression product (for example, immunoprecipitations, enzyme tests). In carrying out the invention, it is preferred to not investigate exclusively all the genes mentioned here; however, the best results are achieved if at least 80, preferably at least 70, more preferably at least 60, more preferably at least 50, more preferably at least 40, more preferably at least 30, more preferably at least 30 [sic], more preferably at least 20, more preferably at least 15, more preferably at least 10, more preferably at least 10 [sic], more preferably at least 5, more preferably three, more preferably at least two genes, or their expression profile or expression level are/is determined. The person skilled in the art can without difficulty combine the technical teaching of this invention with the determination of other parameters, particularly other markers, marker genes, in order to be optionally able to make other diagnostic statements. For example, additional tumor markers and/or metastasis markers can be determined. These additional tumor markers are known to the specialists. Tumor markers are, for example, p53, α-fetoprotein, and CEA (carcinoembryonic antigen). CEA is a standard tumor marker for evaluating tumors of the large intestine. As mentioned above, clinical, histopathological and molecular prognostic factors are described and proposed by the American Joint Committee on Cancer Diagnostic Factors (Compton (2000), loc. cit.).

[0028] As presented above, according to the invention, in the method for detecting a (colorectal) carcinoma, at least three, but preferably at least two of the marker genes represented here (selected from the group of the 120 gene/gene segments, as shown in SEQ ID NOs: 1-181) are determined. Additional embodiments can be obtained from the experimental part.

[0029] The methods, mentioned above under secondary point (a), for detecting a (colorectal) carcinoma can comprise particularly the selection and the determination of the expression profile of at least one, preferably at least two, and most preferably at least three genes of the 120 marker genes as shown in SEQ ID NO: 1 to SEQ ID NO: 181, where the expression profile of the gene is compared with the average expression profile of normal intestinal mucosa. As already mentioned above, the normal intestinal mucosa can originate from the patient, or also from other individuals.

[0030] In the following embodiments, preferred genes which can be used for detecting a colorectal carcinoma in the method according to the invention are represented.

[0031] Thus, for detecting a colorectal carcinoma, the method comprises particularly the determination of the gene expression profile of at least two genes, where at least one of the two genes (as represented in SEQ ID NOs: 1-120) from the “minimal sets” or “subsets,” as defined below, is used. These “minimal sets” comprise preferably the corresponding above-mentioned and selected 72, 55, 33, 18, 17 or 3 genes. From the “minimal sets”/gene panels/“subsets” defined herein, individual genes/gene expression profiles can be determined according to the invention for the in vitro detection of a carcinoma, preferably a colorectal carcinoma. Additional details can also be obtained from the experimental part and the tables. As discovered here unexpectedly, for example, a particularly preferred “minimal set” for determination/prediction of a colorectal carcinoma comprises the 3 marker genes as characterized in SEQ ID NOS: 25, 41 and 68. Variants of the 3 marker genes are represented in SEQ ID NOS: 136-138.

[0032] In this, as well as in the following embodiments, it is understandable to the person skilled in the art that they are preferred embodiments. The person skilled in the art will also determine only individual genes, preferably at least two, more preferably at least 3 genes (or their gene expression profiles/gene expression levels) according to the invention. In the process, he will also use/be able to use a selection of the different “minimal sets” represented here.

[0033] In a preferred embodiment of the method comprising the invention for detecting a (colorectal) carcinoma, a selection is made of the marker genes of the expression profile of at least one gene, preferably at least two genes, preferably at least 3 genes, of the 72 marker genes, which are represented in SEQ ID NO: 1 to SEQ ID NO: 72 or SEQ ID NO: 121 to SEQ ID NO: 156, and evaluated. Again one can, for example (and preferably), determine the expression profile of these 72 genes (or a selection thereof) in the tissue to be tested and compare it with healthy tissue. Corresponding embodiments and tissue details can be obtained from the experimental part.

[0034] In a more preferred embodiment, the invention comprises a method for detecting a (colorectal) carcinoma where the expression profile of at least one gene, preferably at least two genes, more preferably of at least three genes of 55 marker genes is determined. These 55 genes are defined in Table D, particularly via the SEQ ID NOs: 10, 14, 25, 41, 52, 63, 68 and SEQ ID NO: 73 to SEQ ID NO: 120, but they also comprise variants of these genes, as represented in SEQ ID NOs: 136, 137, 138, 153, 154, 155, 157-181.

[0035] In a more preferred embodiment, the invention comprises a method for detecting a (colorectal) carcinoma where the expression profile of at least one gene, preferably at least two genes, more preferably of at least three genes of the 33 marker genes is determined. These 33 genes are defined in Table D particularly via the SEQ ID NOs: 2, 7, 8, 12, 19, 21, 25, 33, 38, 41, 45, 49, 50, 51, 54, 66, 68, 70, 78, 83, 85, 86, 92, 99, 101, 103, 104, 105, 109, 112, 114, 115 and 118, but also genes variants of these genes, as represented in SEQ ID NOs: 122, 124, 136-140, 157, 159-162, 170, 171, 172, 174 and 177-180.

[0036] In a more preferred embodiment, the invention comprises a method for detecting a (colorectal) carcinoma where the expression profile of at least one gene, preferably at least two genes, more preferably of at least three genes of the 18 marker genes is determined. These 18 marker genes are defined in Table D particularly via the SEQ ID NOs: 2, 7, 8, 12, 19, 21, 25, 33, 38, 41, 45, 49, 50, 51, 54, 66, 68 and 70, but also variants of these genes, as represented in SEQ ID NOs: 122, 124 and 136-140. Another selection of the at least 18 genes which is also according to the invention comprises in this embodiment the determination of at least one gene, preferably at least two genes, more preferably at least three genes of the 18 marker genes which comprise the genes, as represented in SEQ ID NOs: 25, 41, 68, 78, 83, 85, 86, 92, 99, 101, 103, 104, 105, 109, 112, 114, 115 or 118, but also variants of these genes, as represented in SEQ ID NOs: 136-138, 157, 159-162, 170-172, 174 and 177-180.

[0037] In a most preferred embodiment in the sense of the invention, the invention comprises a method for detecting a (colorectal) carcinoma where the expression profile(s) of at least one, preferably at least two, and more preferably all three of the 3 marker genes is/are determined. These 3 genes are defined in Table D, particularly via the SEQ ID NOs: 25, 41 and 68, but they also comprise variants of these genes as represented in SEQ ID NOs: 136-138, and they also comprise additional variants and homologs of these genes.

[0038] As defined below, the term “marker genes” in the sense of this invention comprises not only the specific gene sequences (or the corresponding gene products), as represented in the specific nucleotide sequences, but also gene sequences which are homologous, preferably highly homologous, with these sequences. “Highly homologous sequences” comprise sequences which present at least 80%, preferably at least 90%, most preferably at least 95% homology with the sequences represented in the SEQ ID NOS:1-181. In the context of this invention, “highly homologous sequences” also comprise sequences which code for gene products (for example, RNA or proteins), which are at least 80% identical to the defined gene products of SEQ ID NOS: 1-181.

[0039] The sequence identity can be determined in the usual manner using computer programs such as, for example, the Bestfit program (Wisconsin Sequence Analysis Package, Version 8 for Unix Genetics Computer Group, University Research Park, 575 Science Drive Madison, Wis. 53711). Bestfit uses the local homology algorithm of Smith and Waterman, Advances in Applied Mathematics 2 (1981) 482-489, to find the segment with the highest sequence identity between two sequences. When using Bestfit or another sequence alignment program for determining whether a certain sequence is, for example, 95% identical to a reference sequence of the present invention, the parameters are preferably set so that the percentage of identity is calculated over the entire length of the reference sequence, and homology gaps (“gaps”) of up to 5% of the total number of nucleotides in the reference sequence are allowed. When using Bestfit, the so-called optional parameters are preferably left at the preset (“default”) values. The deviations which occur in the comparison of a given sequence with the above-described sequences of the invention can be caused, for example, by addition, deletion, substitution, insertion or recombination. It is preferred for such a sequence comparison to be carried out additionally with the program DNASIS (Version 6.0, Hitachi Software Engineering co. Ltd., 1984, 1990). Here too, the “default” parameter settings (cut-off score: 16, Ktup: 6) should be used.

[0040] The data of the experimental part show that by determining at least one, preferably two, or most preferably three marker genes as defined via Table D and SEQ ID NOS: 25, 41 and 68 (and also represented by the variants as represented in SEQ ID NOS: 136-138), a clear determination of colorectal carcinoma can be carried out; see also Examples 1-3 and 17.

[0041] The method already mentioned under secondary point (b) for predicting metastases, preferably liver metastases dependent on a primary (colorectal) carcinoma can comprise particularly the selection and the determination of the expression profile of at least one gene, preferably at least two genes of the 120 marker genes disclosed here, where these genes are defined via SEQ ID NO: 1 to SEQ ID NO: 181, and where the expression profile of the genes which is obtained from potential metastatic cells or tissues, preferably in liver cells or liver tissue, is compared with the expression profile obtained from primary colorectal tumor cells or tissues. The samples for the obtention of the two expression profiles can originate from the same patient, or also from different patients.

[0042] In the following embodiments, preferred genes, which can be used in the inventive method for predicting metastases, preferably liver metastases dependent on a primary (colorectal) carcinoma are represented. Thus the method comprises particularly the determination of the gene profile of at least one, preferably at least two genes, where at least one of the two genes of the 120 marker genes (as represented in SEQ ID NOs: 1-181) from the “minimal sets,” as defined below, is used. These “minimal sets” comprise, among other selections and preferably, the 72, 55, 22, 20 or 2 genes mentioned in connection with this embodiment. However, as in other embodiments, it is also possible to construct other “minimal sets”/“subsets” or gene panels, where the ones mentioned here are preferred. As one can see in Tables 2 and 3, in the determination of the expression data, not all 120 genes are absolutely purely indicative (marked “none”). However, these genes or their expression profile can also be determined according to the invention, and the corresponding results can be used, among other purposes, as internal controls. Additional details can also be obtained from the experimental part, and from the tables (Tables 2 and 3).

[0043] In a preferred embodiment of the method comprising the invention for predicting metastases dependent on a primary (colorectal) carcinoma, preferably liver metastases, a selection of the marker genes of the expression profile of at least one gene of the 72 marker genes defined in Table 2 is made, which marker genes are also represented in SEQ ID NO: 1 to SEQ ID NO: 72 or SEQ ID NO: 121 to SEQ ID NO: 156, and evaluated. Again, for example (and preferably), the expression profile of the 72 genes can be obtained from potential metastatic cells or tissues, preferably liver cells or liver tissues, and compared with the expression profile from primary colorectal tumor cells or tissues.

[0044] In a more preferred embodiment, the invention comprises a method for predicting metastases dependent on a primary carcinoma, particularly a colorectal carcinoma, preferably predicting liver metastases, where the expression profile of at least one gene of the 55 marker genes defined in Table 3 is determined. These 55 genes are defined in Table D, particularly via SEQ ID NOs: 10, 14, 25, 41, 52, 63, 68 and SEQ ID NO: 73 to SEQ ID NO: 120, however, they also comprise variants of these genes as represented in SEQ ID NOs: 136, 137, 138, 153, 154, 155, 157-181. In this embodiment, as well as the following embodiments, it is clear to the person skilled in the art that they are preferred embodiments. The person skilled in the art will also, according to the invention, determine only individual genes, preferably at least two, more preferably at least 3 genes (or their gene expression profiles/gene expression levels). In the process, he will also use/be able to use a selection of the different “minimal sets” or gene panels represented here, where these “minimal sets” already represent a selection of the 120 marker genes according to the invention. In a more preferred embodiment, the invention comprises a method for predicting metastases dependent on a primary carcinoma, particularly a colorectal carcinoma, preferably predicting liver metastases, where the expression profile(s) of at least one gene, preferably at least two, more preferably at least 3, more preferably at least 5 of the 22 marker genes defined in Table C is/are determined. These 22 genes are defined in Table D, particularly via the SEQ ID NOs: 17, 19, 20, 22, 26, 29, 30, 31, 33, 35, 37, 40, 48, 58, 59, 64, 66, 69, 71, 72, 74 and 109, but they also comprise variants of these genes as represented in SEQ ID NOs: 125, 133, 134, 135, 151, 152, 156 and 177.

[0045] In a more preferred embodiment, the invention comprises a method for predicting metastases dependent on a primary carcinoma, particularly a colorectal carcinoma, preferably predicting liver metastases where the expression profile of at least one gene, preferably at least two genes, more preferably at least three genes, more preferably at least 5 genes of the 20 marker genes is determined. These 20 genes are defined in Table D, particularly via SEQ ID NOs: 17, 19, 20, 22, 26, 29, 30, 31, 33, 35, 37, 40, 48, 58, 59, 64, 66, 69, 71 and 72, but they also comprise variants of these genes as represented in SEQ ID NOs: 125, 133, 134, 135, 151, 152 and 156.

[0046] In a most preferred embodiment in the sense of the invention, the invention relates to a method for predicting metastases dependent on a primary (colorectal) carcinoma, preferably liver metastases where the expression profile of at least one of the two marker genes as represented in SEQ ID NOs: 74 and 109, is determined.

[0047] The prediction of metastases of a primary colorectal carcinoma is particularly important for children, because it can influence the further treatment of the patient. If no metastases are found (neither lymph node metastases nor distant metastases), the stage is called UICC stage I or II. These tumors, if they are colon carcinomas, are then treated by surgery. An additional adjuvant chemotherapy is not provided for (outside of the clinical studies). However, if lymph nodes metastases (UICC stage III) are found, then, according to the guideline of the German Cancer Association and other international associations, a postoperative adjuvant chemotherapy is required. Adjuvant chemotherapy results in 3-year disease-free survival rate for the patients of approximately 80%, whereas without subsequent chemotherapy the 3-year survival rate is only approximately 60%. The overall survival is significantly influenced by the adjuvant chemotherapy. In the case of rectal carcinoma, it is also of decisive importance whether lymph node metastases are already present. In these cases, preoperative radiochemotherapy is recommended because it significantly reduces the development of local recurrences in the rectum. In addition, preoperative radiochemotherapy results in a significantly greater number of patients being operated on under continence-preserving conditions, which, in these patients, leads to a considerable improvement of the postoperative quality of life.

[0048] If distant metastases are already present in a patient with colorectal carcinoma (UICC stage IV), then, after a curative operation of the primary tumor, a palliative chemotherapy should be carried out to extend the survival time of the patients. In addition, by using palliative therapy, up to 15% of the patients who were considered inoperable because of distant metastases can receive secondary curative surgery, and they have an overall 5-year survival rate of approximately 30%.

[0049] The imaging procedures that are usually used in the diagnosis and therapy planning of colorectal carcinomas (for example, computer tomography (CT), magnetic resonance tomography (MRT), positron emission tomography (PET) or preoperative endosnography [sic; endosonography] in rectal carcinomas) are frequently unable to detect small aggregates of tumor cells (so-called micrometastases) in lymph nodes or in other organs. Therefore, the actual tumor stage is often evaluated at too low a level, and an adjuvant or palliative therapy that may have been required is not administered. Therefore, a particularly high clinical relevance is associated, as disclosed in the invention, with the molecular prediction of metastases dependent on a primary colorectal carcinoma, that is the prediction of individual tumor cells that have already established separate colonies from the primary tumor, while not yet presenting clinically symptomatic metastases, in distant regions of the body, usually the lymph nodes and liver, because molecular prediction leads to therapeutic decisions which potentially increase the life and the quality of life of patients with colorectal carcinomas. Surprisingly, the markers disclosed in this invention are also suitable for the early detection of metastases and their precursors. In addition, a preferred embodiment, which consists of measuring proteins or protein fragments and peptides of the translated gene sequences of the 120 genes in the serum or plasma by simple blood collection the context of the usual standard diagnosis can be easily integrated and does not require any additional, invasive interventions while at the same time providing useful information with regard to the therapy management. This capacity highlights the technical and diagnostic superiority of the in vitro methods and the corresponding diagnostic kits which are disclosed herein, compared to the methods that have been standard to date.

[0050] The method, mentioned above under secondary point (c) for predicting the response to a therapy, particularly the response of metastases to a 5-FU-containing chemotherapy or combination therapy, can comprise particularly the selection and the determination of the expression profile of at least one, preferably at least two genes, more preferably at least three genes from the group of the 120 marker genes disclosed here, where these genes are defined via the SEQ ID NO: 1 to SEQ ID NO: 181, and where the expression profile of the genes, obtained from tumor or metastasis samples, preferably metastasis samples of patients who respond to a therapy, is compared with the expression profile from metastasis samples of patients who do not respond to a therapy. The corresponding therapy is a 5-FU-containing chemotherapy and/or a 5-FU-containing combination therapy.

[0051] However, the corresponding marker genes can be determined not only in tumor and/or metastasis samples, but also in other biological products such as, for example, blood or blood serum. As explained below, it is possible to determine, for example, “acute phase” markers/“acute phase” proteins/“acute phase” genes in blood/blood serum (or optionally other body fluids such as axillary ascites or lymph fluid), to distinguish “responders” from “non-responders.”

[0052] In the following embodiments, the preferred genes are represented which can be used in the method according to the invention for predicting the response of metastases to a therapy. Thus, the method comprises particularly the determination of the gene expression profile of at least one, preferably two genes, where one uses at least one of the two genes of the 120 marker genes (as represented in SEQ ID NOs: 1-181) from the “minimal sets,” as defined below. These “minimal sets” comprise, among other genes and preferably, the mentioned 72, 55, 34, 28 or 7 genes. However, as needed, other “minimal sets”/gene panels selected from the 120 marker genes represented here can be constructed, which lead to the determination of “responders” and/or “non-responders.” For example, it is preferred to select a “minimal set”/subset/gene panel of the 120 marker genes defined herein, whose determination in biological fluids, specimens (such as, for example, and particularly blood/blood serum, or also lymphatic fluid) is simplified. Such a “minimal set”/subset/gene panel comprises, for example, the “acute phase proteins/genes” disclosed herein.

[0053] Therefore, the invention comprises the determination of serum markers, in an embodiment, the determination and/or prediction, differentiation of “responders”/“non-responders” to a 5-FU-containing chemotherapy and/or combination therapy. In a preferred embodiment of this invention, for differentiating responders from non-responders to a 5-FU-containing chemotherapy or combination therapy, it is suitable to use the determination of serum markers from blood or other body fluids, as well as from the stool of the patients, particularly before chemotherapy. Mention should be made here particularly of the so-called acute phase proteins, which are already used in daily clinical practice to observe the course of inflammations under antibiotic therapy, and which have been shown to be robust and valid parameters in infection wards. Surprisingly, these markers are also suitable for predicting the response of primary tumors and metastases to chemotherapy. The genes of the underlying acute phase proteins—which are also listed in Table 1—are: complement component 1, q subcomponent, beta polypeptide [Affymetrix number 202953_at], SEQ ID number 4; apolipoprotein E [Affymetrix number 203382_s_at], SEQ ID number 6; apolipoprotein C-I [Affymetrix number 204416_x_at], SEQ ID number 13; coagulation factor V (proaccelerin, labile factor) [Affymetrix number 204714_s_at], SEQ ID number 18; fibrinogen, B beta polypeptide [Affymetrix number 204988_at], SEQ ID number 20; orosomucoid 1 [Affymetrix number 205041_s_at], SEQ ID number 22; apolipoprotein B (including Ag(x) antigen) [Affymetrix number 205108_s_at], SEQ ID number 23; fibrinogen, A alpha polypeptide [Affymetrix number 205650_s_at], SEQ ID number 29; coagulation factor II (thrombin) [Affymetrix number 205754_at], SEQ ID number 30; transferrin [Affymetrix number 214063_s_at], SEQ ID number 58; complement component 4A [Affymetrix number 214428_x_at], SEQ ID number 59; serum amyloid A2 [Affymetrix number 214456_x_at], SEQ ID number 60; orosomucoid 2 [Affymetrix number 214465_at], SEQ ID number 61; complement component 3 [Affymetrix number 217767_at], SEQ ID number 66; complement component 1, q subcomponent, alpha polypeptide [Affymetrix number 218232_at], SEQ ID number 67; fibrinogen, gamma polypeptide [Affymetrix number 219612_s_at], SEQ ID number 69; and C-reactive protein, pentraxin-related [Affymetrix number 37020_at], SEQ ID number 71.

[0054] The above-mentioned genes/gene products thus represent another “minimal set”/gene panel or “subset” of the invention. It is preferred for the expression profile to consist of at least one, more preferably at least 3, more preferably at least 5, most preferably at least 7 of the above-mentioned “acute phase” genes (or gene products) for predicting “responders” and “non-responders” to a 5-FU-containing therapy. Additional details can be obtained from the experimental part and the tables.

[0055] In a preferred embodiment of the method of the invention for predicting the response of metastases to a 5-FU-containing therapy, a selection is made of the expression profiles from the 72 marker genes defined in Table 1, which are represented in the SEQ ID NO: 1 to SEQ ID NO: 72 or SEQ ID NO: 121 to SEQ ID NO: 156, and evaluated. Again, for example (and preferably), the expression profile of the genes obtained from metastasis samples of patients who respond to a therapy is compared to the expression profile from metastasis samples of patients who do not respond to a therapy.

[0056] In a more preferred embodiment, the invention comprises a method for predicting the response of metastases to a therapy, particularly to a 5-FU-containing therapy, where the expression profile of at least one gene of the 55 marker genes defined in Table 4 is determined. These 55 genes are defined in Table D, particularly via the SEQ ID NOs: 10, 14, 25, 41, 52, 63, 68 and SEQ ID NO: 73 to SEQ ID NO: 120, but they also comprise variants of these genes, as represented in SEQ ID NOs: 136, 137, 138, 153, 154, 155, 157-181. In this embodiment as well as in the following embodiments, the person skilled in the art knows that these are preferred embodiments. The person skilled in the art will also determine only individual genes, preferably at least two, more preferably at least 3 genes (or their expression profiles/gene expression levels). These genes can originate from different “minimal sets” defined here.

[0057] In a more preferred embodiment, the invention comprises a method for predicting the response of metastases to a therapy, where one determines the expression profile of at least one, preferably at least two, more preferably at least 3, more preferably at least 5 gene(s) of the 34 marker genes defined in Table A. These 34 genes are defined in Table D, particularly via the SEQ ID NOs: 6, 7, 8, 10, 13, 14, 24, 25, 41, 45, 46, 48, 52, 54, 60, 61, 63, 65, 66, 68, 73, 78, 79, 80, 89, 97, 98, 101, 104, 107, 108, 116, 117 and 120, but they also comprise variants of these genes as represented in SEQ ID NOs: 122, 136-147, 151-155, 157, 167, 168, 169, 171, 172, 176 and 181.

[0058] In a more preferred embodiment, the invention comprises a method for predicting the response of metastases to a therapy, where one determines the expression profile of at least one, preferably at least two, more preferably at least 3, more preferably at least 5 gene(s) of the 28 marker genes defined in Table A. These 28 genes are defined in Table D, particularly via the SEQ ID NOs: 6, 7, 8, 13, 24, 45, 46, 48, 52, 54, 60, 61, 65, 66, 73, 78, 79, 80, 89, 97, 98, 101, 104, 107, 108, 116, 117 and 120, but they also comprise variants of these genes, as represented in SEQ ID NOs: 122, 139-147, 151, 152, 157, 167, 168, 169, 171, 172, 176 and 181.

[0059] In a most preferred embodiment in the sense of the invention, the invention comprises a method for predicting the response of metastases to a therapy where the expression profile of at least one, preferably at least two, more preferably at least 3 of the following 7 marker genes is determined. These 7 genes are defined in Table D, particularly via the SEQ ID NOs: 10, 14, 25, 41, 52, 63 and 68, but they also comprise variants of these genes as represented in SEQ ID NOs: 136, 137, 138, 152, 154 and 155.

[0060] The term “marker gene” in connection with this invention comprises, according to the invention; a gene or a gene segment which presents at least 60% homology, preferably at least 65% homology, more preferably at least 70% homology, more preferably at least 75% homology, more preferably at least 80% homology, more preferably at least 85% homology, more preferably at least 90% homology, more preferably at least 95% homology, more preferably at least 96% homology, more preferably at least 97% homology, more preferably at least 98% homology, more preferably at least 99% homology, and most preferably at least 100% homology with the gene represented in SEQ ID NO 1 to SEQ ID NOs 181, in the form of deoxyribonucleotides or corresponding ribonucleotides, or the proteins derived therefrom. A protein derived from the 120 marker genes (defined in SEQ ID NOs: 1-181, for example, in Table D), denotes in this invention, according to this invention, a protein, a protein fragment or a polypeptide which is translated in the native reading frame (in frame).

[0061] The “obtention of an expression profile” of the marker genes comprises, according to the invention, the obtention of the above-described expression profile from one or more samples of one or more individuals.

[0062] These “individuals” are primarily humans, however, the invention can also be applied to other mammals, and particularly to apes, mice, rats, pigs, horses, dogs, cats, hares, rabbits, hamsters and guinea pigs. Moreover, the term “individual” comprises both sick and also healthy representatives of the above-mentioned species.

[0063] A “sample,” according to the invention, denotes one or more cells, tissues, a complete organ or a part thereof. Tumor tissues/tumor cells/metastatic tissue/metastatic cells can also be “samples.” In a preferred embodiment of the invention, the sample is selected from the group consisting of a surgery preparation, tissue biopsy, peritoneal fluid, blood, serum, plasma, lymphatic fluid, lymphatic tissue, urine and stool. As defined here and also represented in the experimental part, the in vitro method presented herein can also be carried out on biological fluids, among other substances, such as blood and/or blood serum. The “samples” to be analyzed are not limited to freshly collected samples, rather, the samples can also comprise fixed or frozen material.

[0064] Accordingly, the present invention is not limited to the investigation of fresh material, and the results according to the invention can also be obtained by examining fixed material, for example, paraffin material. Thus, the results represented here have been successfully transferred from fresh colorectal tissue to paraffinized colorectal tissue, although the two materials present considerable differences, for example, primary tumor tissue instead of metastasis tissue, fixed tissue instead of fresh tissue, mixed tissue instead of microdissociated tumor cells. At the same time, it was possible to show that the methods represented here can be reproduced not only with gene chips, but also by other methods, such as, for example, RT-PCR. In fixed material in particular, it is preferred to also use other detection methods for detecting the gene/gene expression products, for example, RNA specific primers and probes at exon-exon boundaries within the gene, instead of probes against a 3′-region of the genes. In the clinical situation, the investigative material present is usually fixed (i.e., FFPE [formalin-fixed paraffin-embedded] tissue of the primary tumor derived from the tumor resection before chemotherapy). Therefore, the person skilled in the art, according to the invention, will tend to use this detection method. The tests on fixed materials confirm impressively the validity of the (marker) genes and “minimal sets”/“subsets” presented and defined here, both in the in vitro diagnosis of colorectal carcinoma, and also (in a completely different experimental setup) a separation of responders and non-responders to the 5-FU-containing therapy. In addition, several of the primary tumors investigated were not included in the original finding (fresh tissue samples from the metastases), and can thus be considered an independent validation of the significance of the marker genes. To confirm the significance of the 120 marker genes (and marker gene products) described here, RNA was extracted from paraffin tissues, which in part were older than 4 years, originating from primary tumors and metastases, and a gene set of 6 genes from the 120 marker genes as defined herein was analyzed. Differences in the gene expression between “responders” and “non-responders” in the RNA of the paraffin-embedded tumors (colorectal carcinoma, lymph node metastases, peritoneal carcinosis or distant metastases (for example, liver, lung)), were confirmed for the genes: Orosomucoid 1 [Affymetrix number 205041_s_at], SEQ ID number 22; peroxisome proliferative activated receptor, gamma [Affymetrix number 208510_s_at], SEQ ID number 41; homeobox DlI [Affymetrix number 214604_at], SEQ ID number 62; mitogen-activated protein kinase kinase kinase 5 [Affymetrix number 203837_at], SEQ ID number 81; spondin 1 (f-spondin) extracellular matrix protein [Affymetrix number 209436_at], SEQ ID number 98; and homeobox A9 [Affymetrix number 209905_at], SEQ ID number 99. These data are in agreement with the results which are obtained with fresh material. Corresponding shifts in the gene expression in the comparison of “responders” and “non-responders” can be read/determined particularly also in Tables 1 and 4. It is worthy of note here that a gene/a gene expression which, in the comparison between non-responders and responders, is upregulated, is marked “up,” while a gene/a gene expression which, in a comparison between non-responders and responders, is downregulated, is marked “down.” In Table 5—also in the appendix—similar data are presented and data are compared which originate from a specific patient (Patient T). In Table 5; column 6 (in contrast to Tables 1 and 4), the change in the expression profile/level in responders (compared to nonresponse/non-responders) is represented. Thus, for example, the gene profile/gene expression level of the gene characterized by SEQ ID NO: 4 is marked “up” in Table 1 (the gene expression is higher in “non-responders” than in “responders”), and in Table 5 with “↓,” because in Table 5 “responders” are compared to “non-responders.” Thus, Table 5 shows that the gene has a lower expression level in “responders” than in “non-responders.”

[0065] As experimentally shown, it is possible to use, particularly in a preferred embodiment of the invention for differentiating between “responders” or “non-responders” to a 5-FU-containing chemotherapy/combination therapy, a “minimal set” of the 120 marker genes defined herein. A corresponding “minimal set”/subset comprises, for example, the following genes/gene markers: complement component 1, q subcomponent, beta polypeptide [Affymetrix number 20953_at], SEQ ID Number 4; apolipoprotein E [Affymetrix number 203382_s_at], SEQ ID number 6; apolipoprotein C-I [Affymetrix number 204416_x_at], SEQ ID number 13; coagulation factor V (proaccelerin, labile factor [Affymetrix number 204714_s_at], SEQ ID number 18; fibrinogen, B beta polypeptide [Affymetrix number 204988_at], SEQ ID number 20; orosomucoid 1 [Affymetrix number 205041_s_at], SEQ ID number 22; apolipoprotein B (including Ag(x) antigen) [Affymetrix number 205108_s_at], SEQ ID number 23; fibrinogen A alpha polypeptide [Affymetrix number 205650_s_at], SEQ ID number 29; coagulation factor II (thrombin) [Affymetrix number 205754_at], SEQ ID number 30; transferrin [Affymetrix number 214063_s_at], SEQ ID number 58; complement component 4A [Affymetrix number 214428_x_at], SEQ ID number 59; serum amyloid A2 [Affymetrix number 214456_x_at], SEQ ID number 60; orosomucoid 2 [Affymetrix number 214465_at], SEQ ID number 61; complement component 3 [Affymetrix number 217767_at], SEQ ID number 66; complement component 1, q subcomponent, alpha polypeptide [Affymetrix number 218232_at], SEQ ID number 67; fibrinogen, gamma polypeptide [Affymetrix number 219612_s_at], SEQ ID number 69; and C-reactive protein, pentraxin-related [Affymetrix number 37020_at], SEQ ID number 71.

[0066] If necessary, the person skilled in the art will again analyze from this subset only individual genes (gene products), preferably at least two, more preferably at least three, more preferably at least five genes (or gene products) for the determination of “responders” or “non-responders.”

[0067] The Tables 1, 4 and 5 in the appendix particularly provide information regarding the changes of the expression profile of individual genes in the comparison between “responders” and “non-responders”/“non-response.” Thus, for example, for the above-mentioned genes, in the comparison of “responder” versus “non-responder” according to Table 5, the following gene expression qualities are indicated (where “down” means that the corresponding gene expression is downregulated in “responders” in comparison to “non-responders”):
[0068] Complement component 1, q subcomponent, beta polypeptide [Affymetrix number 202953_at], SEQ ID number 4: down
[0069] Apolipoprotein E [Affymetrix number 203382_s_at], SEQ ID number 6: down
[0070] Apolipoprotein C-I [Affymetrix number 204416_x_at], SEQ ID number 13: down
[0071] Coagulation factor V (proaccelerin, labile factor [Affymetrix number 204714_s_at], SEQ ID number 18: down
[0072] Fibrinogen, B beta polypeptide [Affymetrix number 204988_at], SEQ ID number 20: down
[0073] Orosomucoid 1 [Affymetrix number 205041_s_at], SEQ ID number 22: down
[0074] Apolipoprotein B (including Ag(x) antigen) [Affymetrix number 205108_s_at], SEQ ID number 23: down
[0075] Fibrinogen A alpha polypeptide [Affymetrix number 205650_s_at], SEQ ID number 29: down
[0076] Coagulation factor II (thrombin) [Affymetrix number 205754_at], SEQ ID number 30: down
[0077] Transferrin [Affymetrix number 214063 s_at], SEQ ID number 58: down
[0078] Complement component 4A [Affymetrix number 214428_x_at], SEQ ID number 59: down
[0079] Serum amyloid A2 [Affymetrix number 214456_x_at], SEQ ID number 60: down
[0080] Orosomucoid 2 [Affymetrix number 214465_at], SEQ ID number 61: down
[0081] Complement component 3 [Affymetrix number 217767_at], SEQ ID number 66: down
[0082] Complement component 1, q subcomponent, alpha polypeptide [Affymetrix number 218232_at], SEQ ID number 67: down
[0083] Fibrinogen, gamma polypeptide [Affymetrix number 219612_at], SEQ ID number 69: down
[0084] C-reactive protein, pentraxin-related [Affymetrix number 37020_at], SEQ ID number 71: down

[0085] Thus, the serum markers according to Table 5 are then indicative for a “5-FU responder” if they are downregulated, in contrast to “non-responders.”

[0086] The above-mentioned serum markers are therefore particularly well suited to analyze by the investigation of body fluids, particularly blood and/or blood serum, the success or the potential success of a therapy, particularly of a 5-FU-containing chemotherapy/combination therapy. As represented above, the gene expression profile (the gene product quantity) is downregulated (“down;” weaker expression) in responders compared to non-responders, see also Table 5. In connection with Table 5, “↓” denotes a weaker expression of the corresponding gene in “responders” versus “non-responders.”

[0087] In this embodiment as well, the person skilled in the art will not investigate all of the genes/gene products/gene expressions represented here, rather he will use for the in vitro diagnosis a “minimal set”/“subset” comprising at least 2, preferably at least 3, more preferably at least 5 of the marker genes represented here.

[0088] In all the in vitro methods presented here, the person skilled in the art will investigate, according to the invention, at least 1, preferably at least 2, more preferably at least 3, and even more preferably at least 5 of the 120 marker genes represented here for their expression profile (expression level). A positive finding exists (colon carcinoma, prediction of a metastasis or response to a 5-FU-containing chemotherapy/combination therapy (particularly the response of a metastasis)), if at least 60%, more preferably at least 70%, more preferably 80%, preferably at least 90%, more preferably at least 95%, more preferably at least 96%, and most preferably at least 97% of the marker genes investigated present a modification compared to healthy tissue (in the detection of colon carcinoma or a metastasis) or compared to sample material from patients who do not react/respond to a 5-FU-containing therapy (prediction of the response of tumors/metastases to a 5-FU-containing chemotherapy/combination therapy). Corresponding data can also be taken from the experimental part and from the tables to which reference is made herewith. If only one (marker) gene of the selection presented here of the 120 marker genes will be investigated, then the change with respect to the control tissue/control material should be 100%, to yield a positive finding. However, in a particularly preferred method according to the present invention, at least two, preferably at least 3, more preferably at least 5, more preferably at least [sic; omission in source text] gene expression profiles (and thus gene products of the individual marker genes) are analyzed. For example, if 5 genes (or their expression profile) from the 120 marker genes represented here are investigated, then preferably 3 of these 5 genes (60%), more preferably 4 of these 5 genes (80%), more preferably all 5 genes (100%) should present the same expression profile as the corresponding controls (see also the tables in the appendix) to be “positive.”

[0089] Table 5 in the appendix also shows, as a nonlimiting example, that for the methods represented here, it is possible to make more than diagnostic statements if all the selected marker genes have the changes presented in the table at a 100% level. For example, patient T is determined according to the invention as a 5-FU “responder,” in spite of the fact that there were deviations in individual marker genes with regard to the gene expression profiles, as in the standard (see Table 5, column 6). Individual, minimal changes are marked in Table 5 in bold print.

[0090] As also represented in the experimental part of the invention, the expression profile of the 120 marker genes disclosed here (or a selection thereof) is determined preferably by the measurement of the quantity of marker gene mRNA. This quantity of marker gene mRNA can be determined, for example, by the gene chip technology, (RT-) PCR (for example, on fixed material), Northern hybridization, dot blotting or in situ hybridization. However, the method according to the invention can also be carried out if the person skilled in the art measures and identifies the gene products (if present at the protein or peptide level). Thus, the invention comprises the methods described here in which the gene expression products are determined in the form of their synthesized proteins (or peptides). Here both the quantity and the quality (for example, modifications such as phosphorylations or glycosylations) are determined. In this connection, however, it is preferred for the expression profile of the marker genes to be determined by measuring the polypeptide quantity of the marker genes, and, if desired, comparing them with a reference value. The reference value has already been described above and it can originate from healthy or sick tissue. The polypeptide level or the polypeptide quantity of the marker genes, can be determined by the ELISA, RIA, (immuno-) blotting, FACS, or immunohistochemical methods. In particular, the determination of serum markers, as defined here, can also be made with protein biochemistry methods. For example, the expression pattern of the “acute phase proteins” defined here, as selected from the 120 marker genes disclosed herein, can be carried out via such (protein) biochemistry methods, for example, by ELISA, RIA, immunoblotting, etc. As represented here, such methods are useful particularly in the detection of “responders” and “non-responders” to a chemotherapy and/or combination therapy, particularly a 5-FU-containing therapy.

[0091] The invention also relates to a method which comprises the following steps:

[0092] (a) determination of the expression profile, as defined above, in a patient sample; and

[0093] (b) determination with the help of the gene expression profile established in (a), whether the patient

[0094] i. suffers from a colorectal carcinoma;

[0095] ii. presents liver metastases subsequent to a colorectal carcinoma; and/or

[0096] iii. responds to a 5-FU-containing chemotherapy.

[0097] The above-mentioned embodiments also apply to the method represented here. The method will also make available the above-mentioned method to determine whether the patient suffers from a carcinoma, preferably an adenocarcinoma. The method, moreover, is not limited to determining liver metastases or to the response of metastases to a 5-FU-containing therapy. The same applied, mutatis mutandis, to the following methods according to the invention.

[0098] The invention also relates to a kit for carrying out the methods described here, where the kit comprises specific (nucleotide) probes, primer (pairs), antibodies, aptamers for the determination of at least two of the 120 marker genes which are represented in SEQ ID NO: 1-181, or for the determination of at least two gene products of the 120 marker genes comprising the marker genes coded in SEC ID NO: 1 to 181. The kit is preferably a diagnostic kit. In the meaning used according to the invention, “kit” also denotes a “microarray” or a “gene chip.”

[0099] Thus, the invention also comprises the use of one of the 120 marker genes or a group (particularly the “minimal sets” defined herein or also a selection of these genes) of the 120 marker genes, which are represented in SEQ ID NO: 1-81 to determine whether the patient

[0100] (a) suffers from a colorectal carcinoma;

[0101] (b) presents liver metastases subsequent to a colorectal carcinoma; and/or

[0102] (c) responds to a 5-FU-containing chemotherapy, particularly to determine whether the metastasized tumor cells (metastases) respond to such a therapy.

[0103] An additional possible use of the invention can consist of the production of a transgenic, nonhuman animal, preferably a transgenic mouse which overexpresses or underexpresses one or more of the markers. Such a transgenic mouse can be used to prepare a model system, for example for liver metastasis in humans. Thus, the metastasis process, which to date is still only partially understood, could be elucidated, and new knowledge on the metastasizing pathway of colorectal carcinoma or also other carcinomas could be gained. In addition therapeutic or toxic substances could be tested with the help of such a transgenic mouse. A similar principle also constitutes the foundation of knock-out analyses, which can be carried out with the help of the genes of this invention. Thus, the animal according to the invention can also be used for screening procedures.

[0104] Therefore, the invention also relates to the use of a transgenic non-human animal which overexpresses or underexpresses one or more of the marker genes defined here in a screening procedure for drugs. This screening procedure is particularly suitable to screen for agents used in cancer therapy, particularly in the treatment of colorectal carcinomas and/or metastases, preferably liver metastases.

[0105] The use of a transgenic cell which overexpresses or underexpresses one or more of the marker genes defined here in a screening procedure for drugs is also a part of the invention. Here too, it is preferred to screen for drugs for cancer therapy. Thus, this application also preferably represents a use in a screening procedure for drugs for treating colorectal carcinomas and/or metastases, preferably liver metastases.

[0106] As already discussed above, the gene sequences, oligonucleotides or other fragments of the marker genes of this invention can be used to detect and quantify the differential gene expression. Qualitative and quantitative methods for such measurements are known in molecular genetics. In addition, antibodies can be produced against an epitope or a protein or several epitopes or several proteins which were produced by the genes described in this invention. These antibodies can be used to quantify the protein content in a human cell. Protocols for detecting and quantifying the protein expression by monoclonal or polyclonal antibodies are well known in molecular genetics. Examples are ELISA, RIA and FACS analysis.

[0107] The gene sequences or gene fragments, or complementary nucleic acids of the marker genes of this invention can also be used in gene therapy. For example, the cDNA or one or more genes of the invention can be introduced ex vivo into target cells. After stable integration and transcription or translation have been ensured, the cells in the tumors of the patients can be returned and they potentially can correct mutations connected with the underexpression or overexpression of these proteins. Alternatively, the cDNA of one or more genes of the invention can be introduced in vivo by using vectors such as, for example, retroviruses, adenoviruses, HS viruses or bacterial plasmids. The inclusion of cationic liposomes, polylysine conjugates or the direct injection of DNA, in addition, represent nonviral methods.

[0108] An additional use of the invention is the possibility of therapeutically using the proteins coded by the marker genes of the invention, their ligands, or complementary nucleic acid sequences. In particular, the combination of different such drugs can have a synergistic effect on tumor reduction, or it can result in no metastasis occurring. Moreover, these drugs can also be used synergistically with substances that are already established in the therapy of colorectal carcinoma.

[0109] The selected genes which form the basis of the present invention are preferably used in the form of a “minimal set” or in the form of a “gene panel,” that is a collection which comprises the special genetic sequences of the present invention and/or their expression products. The formation of gene panels allows a rapid and specific analysis of specific aspects of cancer diseases, particularly carcinoma, particularly an adenocarcinoma, preferably a gastrointestinal carcinoma, and particularly preferably a colorectal carcinoma, metastasis formation of particularly colon tumors, and also the response to specific chemotherapeutic treatment procedures, particularly a 5-FU-containing chemotherapy/combination therapy. As described and used in this invention, the gene panels can be used with a surprisingly high efficiency for the diagnosis, treatment and monitoring, and also for the analysis of a predisposition for intestinal cell proliferative diseases. In particular, the marker genes represented here (or a subset, minimal set thereof) can be used in the form of gene panels to be analyzed (gene expression panels) in in vitro diagnostics. In addition, the use of a diverse array of the genes used here allows a relatively high level of sensitivity and specificity in comparison to individual analyses. Of the genes whose different gene (expression) profile is described here, the special combination of the genes according to the above-described invention, which is also characterized in the claims, makes available a particularly sensitive and specific means for identifying proliferative cell diseases of intestinal tissues, particularly the colon mucosa and metastases originating therefrom.

[0110] The gene panels described and used in this invention can be used with surprisingly high efficiency for treating and determining the treatment course of proliferative diseases of intestinal cells, (particularly of the colon), by predicting the outcome of the treatment with a therapy comprising one or more 5-FU-containing active ingredients. The analysis of each gene of the panel contributes to the evaluation of the patient responsiveness so that, in a less preferred embodiment, the patient evaluation can be achieved by analyzing only one gene. The analysis of a single member of the “gene panel” would make available an inexpensive but less precise means for evaluating the patient responsiveness; the analysis of several members of the panel would make available a decidedly more expensive means for carrying out the method of the invention which, however, would be more precise (the technically preferred solution). The same applies, mutatis mutandis, for the determination of a carcinoma, particularly an adenocarcinoma, preferably a gastrointestinal carcinoma, and particularly preferably a colorectal carcinoma, and the determination described herein of metastases, particularly liver metastases. Therefore, as a rule, the methods according to the invention comprise at least the investigation of the expression profile of two, preferably at least three, preferably at least four, preferably at least five, preferably at least six, preferably at least seven, preferably at least eight, preferably at least nine, preferably at least ten, preferably at least 15, preferably at least 20, preferably at least 25, preferably at least 30, preferably at least 35, preferably at least 40, preferably at least 45, preferably at least 50, preferably at least 55, preferably at least 60, preferably at least 65, preferably at least 70, preferably at least 75, preferably at least 80, preferably at least 85, preferably at least 90, preferably at least 95, preferably at least 100, and preferably at least 110 of the 120 marker genes described herein.

[0111] The methods according to the present invention are used for the improved detection, for the treatment and monitoring of proliferative diseases of intestinal cells, particularly of the colon mucosa.

[0112] The present invention, moreover, relates to the diagnosis and/or prognosis of events which can be detrimental or relevant to the patients or individuals, in which procedures the gene expression of the 120 marker genes represented here (or a minimal set thereof), can be compared with another set of gene expression parameters (for example, of healthy controls or of 5-FU-responders/nonresponders), where the differences are used as the basis for the diagnosis and/or prognosis of events which are detrimental or relevant to patients or individuals.

[0113] In connection with the present invention, the expression “chemotherapy” denotes the use of active ingredients of chemical substances, particularly 5-FU-containing substances and substance mixtures, for treating cancer and/or metastases.

[0114] The invention will be explained with greater precision on the basis of the following sequences, tables and examples, without being limited to them.

[0115] The tables show:

[0116] Table 1 contains the genes which are expressed differentially in the present invention between a primary tumor and liver metastases. (Further explanations for Table 1 can be found in the description of the invention.)

[0117] Table 2 contains the genes which are expressed differentially in the present invention between liver metastases of responders and non-responders to a 5-FU-containing therapy. (Further explanations for Table 2 can be found in the description of the invention.)

Table 3 contains the annotations, gene names and Affymetrix ID numbers of the genes described in Tables 1-3.

[0118] Table 4 expression data after the statistical evaluation according to Example 4b of responders (Resp) versus non-responders (Non-Resp) to a 5-FU-containing palliative chemotherapy.

[0119] Table 5 expression data of responders (Resp), non-responders (Nonresp) and patient T. of Example 16

[0120] Table 6 expression data of colon/rectum mucosa (healthy) versus colorectal (primary) tumor

[0121] Table A Prediction of the response of liver metastases to a 5-FU-containing chemotherapy by the comparison of responders (Resp; n=10) and non-responders.

[0122] Table B Early detection of a colorectal carcinoma by the comparison of healthy mucosa (Muc; n=3) and colorectal carcinoma

[0123] Table C Prediction of liver metastases by the comparison of liver metastases (Lm; n=20) and colorectal carcinoma

[0124] Table D Congruence list of the assigned SEQ ID Nos.

[0125] The figures show:

[0126] FIG. 1 shows schematically the methodological procedure which is used for the establishment of a gene expression profile with predictive significance, and thus are [sic] therefore necessary for the invention. (Further explanations can be found in the examples of the invention.)

[0127] FIG. 2 shows the course of the statistical evaluation using a training test set method. Under A the procedure is shown as carried out in Example 4a, while under B the procedure used in Example 4b is shown. (Further explanations can be found in the examples of the invention.)

[0128] FIG. 3 shows “heat maps” of the expression profiles, which supplies via mathematical algorithms the similarity of the signatures and undertakes a subdivision into groups. FIG. 3A. shows the supervised cluster analysis of the training set, and FIG. 3b the cluster analysis carried out subsequently with a test set which is independent of the training set. (Further explanations can be found in the examples of the invention.)

[0129] FIG. 4 shows the evaluation of the Principal Component Analysis. Each sphere symbolizes here the gene expression profile from a tissue (tumor or metastasis). The spatial proximity of the spheres of both the responders (green) and the non-responders (red brown) to the 5-FU-containing chemotherapy, and the spatial separation between green and red brown spheres shows [sic] the good possibility for discriminating between the two forms of the response. (Further explanations can be found in the examples of the invention.)

[0130] FIG. 5 shows computer tomography (CT) views of patient T. before and after the first-line treatment with a 5-FU-containing therapy. Here the regression in the size of the liver metastases (red bordered) indicates the start of the treatment. This is a partial remission (PR), that is a response to the chemotherapy in accordance with the WHO criteria. This patient also shows the response profile in the gene expression profile from the represented liver metastasis. (Further explanations can be found in the examples of the invention.)

[0131] FIG. 6 shows a Kaplan-Meier (death) curve. The survival time in weeks is plotted on the x axis, and on the y axis the cumulative survival or death in %. The stratification was carried out in accordance with the gene expression profile between responders (solid line) and non-responders (broken line). The advantage in terms of patient survival can be seen in the response signature. The log rank analysis yielded a statistical significance of p=0.030. (Further explanations can be found in the examples of the invention.)

[0132] The following examples illustrate the invention without limiting it in any way.

### EXAMPLE 1

### Obtention and Purification of the Tissue

[0133] The tissue samples of normal colon mucosa, colorectal carcinoma and the corresponding liver metastases are obtained intraoperatively, frozen immediately in liquid nitrogen, and then archived at −80° C.

[0134] Using a cryotome, 5-μm thick sections of the tumor samples are prepared, applied to a glass slide, and stained with hematoxylin eosin (HE). Only tumor samples which contain a tumor cell portion, determined by microscopy, of at least 80% are chosen for further processing.

[0135] Then, using the cryotome, 30-μm thick sections of the selected tumor specimens are prepared, applied to special membrane slides (membrane slides for laser microdissection; Molecular Machines & Industries AG; CH-8152 Glattbrugg), and immediately transferred to 70% ethanol.

[0136] For the preparation of the laser microdissection, the following incubation steps were then carried out:

[0137] 1. 30 sec in Mayer's hemalum solution

[0138] 2. rinsing in RNase-free water

[0139] 3. allowing color change to blue for approximately 30 sec in RNase-free water

[0140] 4. washing for 30 sec in 70% ethanol

[0141] 5. washing for 60 sec in 95% ethanol

[0142] 6. 30 sec in eosin Y solution

[0143] 7. washing for 60 sec in 95% ethanol

[0144] 8. washing for 60 sec in 95% ethanol

[0145] 9. washing for 60 sec in 100% ethanol

[0146] 10. washing for 5 min in 100% xylene, and

[0147] 11. drying of the sections in air and possibly removal of xylene residue with a lint-free cloth

[0148] The tumor cell areas were then cut out with a laser microdissection apparatus (LMD) from Leica, and transferred into a reaction vessel. Then the total RNA was isolated from the tumor cell areas according to the manufacturer's protocol using an RNeasy Mini-Kit (Order No. 74104) from Qiagen. Appropriate protocols can be obtained from the manufacturer, or are published on the Internet.

[0149] The quality of the isolated total RNA was verified with the help of a Lab-on-a-Chip apparatus (Agilent), and only quantitatively sufficient total RNA (>100 ng) as well as high-quality RNA are used for the following work steps.

### EXAMPLE 2

### Preparation and Amplification of a RNA from Isolated Total RNA

[0150] The preparation of amino-allyl labeled cRNA (aRNA) from the total RNA and its amplification was carried out according to the Eberwine method (van Geldern R N et al. (1990); PNAS USA 87:1663-7) and using the MessageAmp® kit from Ambion according to the manufacturer's protocol. Appropriate protocols can be obtained from the manufacturer, or are published on the Internet.

[0151] The labeled cRNA was purified and concentrated with the “RNeasy mini” kit from Qiagen. The work steps required for this purpose were carried out according to manufacturer's protocol, which is also published on the Internet.

### EXAMPLE 3

### Use of the Affymetrix Gene Arrays

[0152] The probe which is to be used for the hybridization was prepared by fragmenting labeled cRNA. Then, HG U133-A microarrys [sic; microarrays] from the company Affymetrix were hybridized with this probe, unbound probe was removed, and the raw data were read with the GeneArray Scanner Agilent. The work steps for carrying out the mentioned procedures were carried out in accordance with the instructions in the Handbook for Gene Expression Analysis (Affymetrix). The signal intensities and the detection signals (“detection calls”) were established with the help of the GeneChip 5.0 Software from Affymetrix.

### EXAMPLE 4

### Statistical Evaluation of the Data Obtained

[0153] The data collected with the GeneArray Scanner on the hybridization of the labeled cRNA fragments with Microarray sequences were then evaluated statistically. The evaluation was carried out in two ways:

[0154] a) The method comprised the establishment of a training set and the verification of the data obtained on a test set.

[0155] 1. The data sets were “published,” that is made comparable, using Affymetrix® Software.

[0156] 2. Preliminary evaluation using the Affymetrix Data mining tool (average Resp, average Non-Responder, fold-change, t-test Resp. vs. Non-responder p<0.05). The training set (n=10) was compiled randomly. 726 genes are expressed significantly differently.

[0157] 3. The data are transferred to Excel. Then, the genes that were expressed with a significant difference in the t-test are reduced further by reduction to genes which are expressed with >3 fold difference. Reduction to 168 genes.

[0158] 4. The additional filtration is carried out by reduction to genes which present an average signal value in at least one group of >300. Reduction to 82 genes.

[0159] 5. Removal of genes that are listed twice or multiple times on the chip. Reduction to 72 genes.

[0160] 6. The expression profile of the 72 genes (also represented in Table 2) is used with the test set (n=7) and clustered hierarchically based on correlation (Spotfire® Software). Two clusters are produced which correspond 100% to the responders and non-responders. The survival times of the patients (time of death or last date of life minus time of operation) are calculated, and a Kaplan-Meier curve with the variable “bad”-“good” response is established. In the log-rank test, the significance determined for the total survival is p=0.04.

[0161] b) An alternative method for the statistical evaluation of the raw data started with the available 30 data sets and formed five groups therefrom: Group_{—}1 LM responder, Group_{—}2 LM non-responder; Group_{—}3 PR responder; Group_{—}4 PR non-responder and Group_{—}5 with undefined clinical response. The finding phase was subdivided into two parallel sections A and B. In the finding section A, using the t-test, Welch, Wilcoxon and Kolgomorov-Smirnov analysis, the statistically significant differentially regulated genes were identified distinguishing between the Groups_{—}1 and _{—}2 using data sets with n=8 and n=9, respectively. In the process, the cutoff level for the significance was set at p=0.05. The analysis showed that one group of 806 genes of the entire gene pool of 22,283 genes was significant. In a second step, these genes were subjected to a quality analysis, which showed that 230 genes could not be validly measured using the Affymetrix gene chip system, and an additional 3 genes were below the set detection threshold of 30 RLU [relative light units]. In an additional analysis step, all those genes were separated from the remaining 573 genes which, with respect to their biological function, must be considered to be connected with the inflammatory reactions or the immune system. This was done on the basis of gene lists established beforehand, and on literature data—such as the data banks (NCBI, OMIM [Online Mendelian Inheritance in Men], UNIGENE). In order to identify as having predictive value only those genes whose relative expression change is clearly measurable, another process was carried out to remove each gene whose delta in the expression between Group_{—}1 and Group_{—}2 is greater than a factor 2. This criterion was satisfied by 191 genes. In a crossvalidation step, kNN (k nearest neighbor) analysis and the inclusion of Group_{—}5, as well as the use of a so-called gene ranking, allowed the reduction of the genes to 55. Using these genes in the kNN analysis, only three data sets were classified as incorrect with k=3 and 25% test set fraction, as well as 10,000 iterations.

[0162] In the second independent finding attempt [unconfirmed translation], starting from the same Groups_{—}1 and _{—}2, and following a previous quality analysis of 22,283 genes, only 15,000 were considered to be valid (expressed with sufficient differentiation) in this analysis construction. Using these approximately 15,000 genes, a gene reduction was carried out based on SVM (support vector machines) algorithms, which were shown to be particularly well suited to solve n-dimensional problems with two or more classes (Weston and Watkins, Proceedings of the Seventh European Symposium On Artificial Neural Networks, April 1999; Vapnik, The Nature of Statistical Learning Theory, 1995, Springer, N.Y.; Vapnik, Statistical Learning Theory, 1998, Wiley, New York; Burges, Data Mining and Knowledge Discovery 2(2):955-974, 1998). Using these algorithms, a hyperplane (separation plane) was defined in the n-dimensional space; it consisted of the “vectors” of the individual genes and their expression level. The reduction yielded 181 genes required for a predictive separation. After checking the data for “duplicate” listings which result from the multiple representation of genes on the GeneChip Microarray, and the reduction of immune system genes, 57 genes were available for a first crossvalidation, as already described previously. The cut-off quantity of the two gene groups from the analysis sections A and B was 55 (55 genes, as listed in Table 3). Now, in the next analysis section C, the so far unused data sets of Groups_{—}3 and _{—}4 were used in a validation with kNN algorithms and in a PCA (principle component analysis). With the exception of one data set from Group_{—}4, all the primary tumor samples were assigned correctly to the appropriate “responder” or “non responder” groups.

[0163] Thus, the invention makes available 72 and 55 (marker) genes whose expression profile and/or expression level can be used both for (early) detection of a colorectal carcinoma, for the prediction of metastases (preferably liver metastases) dependent on a primary colorectal carcinoma and/or for the prediction of the response of metastases to a 5-FU-containing therapy (chemotherapy). Because the genes presented here, of 72 and 55 genes, have overlaps, a total of 120 genes is made available here (represented in SEQ ID NO: 1 to SEQ ID NO: 181, and shown in Tables 2 and 3, and also in Table D), with which the person skilled in the art can carry out the method according to the invention, as well as the use of the invention. SEQ ID NO: 1-120 here relate to individual genes which corresponds to the 120 marker genes. The additional sequences, as represented in SEQ ID NO: 121-181, are variants of individual marker genes. The corresponding correlation of the individual marker genes (120) with the sequences (181) can be obtained from the tables, particularly Table D. The “kits” of the invention are defined by, and newly prepared using, these 120 genes.

[0164] The tables in the appendix (particularly Tables 1-5 and A, B, C, and D) allow the person skilled in the art to determine and to analyze the selected expression profiles.

### EXAMPLE 5

### 72 Genes and a Selection Thereof from Table 2 which are Suitable as Marker Genes for the Detection of a Colorectal Carcinoma

[0165] The values of column 7 in Table 2 show a significant differential expression of the 72 genes described for colon mucosas and colorectal carcinomas. From them, one can disclose the use of these genes as marker genes for the detection of a colorectal carcinoma. Based on a particularly high significance of p<0.05 in the t-test (column 7, Table 2), the following gene selection (18 genes) is particularly well suited as marker genes for the detection of a colorectal carcinoma: major histocompatibility complex, class II, DP beta [Affymetrix number 201137_s_at], SEQ ID No. 2; CD163 antigen [Affymetrix number 203645_s_at], SEQ ID number 7; phospholipase C, beta 4 [Affymetrix number 203895_at], SEQ ID number 8 or 122; solute carrier family 31 (copper transporters), member 2 [Affymetrix number 204204_at], SEQ ID number 12; group-specific component (vitamin D binding protein) [Affymetrix number 204965_at], SEQ ID number 19; profilin 2 [Affymetrix number 204992_s_at], SEQ ID number 21 or 124; LGN [lateral geniculate nucleus] protein [Affymetrix number 205240_at], SEQ ID number 25; arylacetamide deacetylase (esterase) [Affymetrix number 205969_at], SEQ ID number 33; Down syndrome critical region gene 6 [Affymetrix number 207267_s_at], SEQ ID number 38; peroxisome proliferative activated receptor, gamma [Affymetrix number 208510_at], SEQ ID number 41, 136, 137 or 138; allograft inflammatory factor 1 [Affymetrix number 209901_x_at], SEQ ID number 45, 139 or 140; major histocompatibility complex, class II, DP alpha 1 [Affymetrix number 211991_s_at], SEQ ID number 49; aldehyde dehydrogenase 1 family member A1 [Affymetrix number212224 at], SEQ ID number 50; plexin D1 [Affymetrix number212235_at], SEQ ID number 51; hypothetical protein PP1665 [Affymetrix number 213343_s_at], SEQ ID number 54; complement component 3 [Affymetrix number 217767_at], SEQ ID number 66; glucosaminyl (N-acetyl) transferase 3, mucin type [Affymetrix number 219508_at], SEQ ID number 68; A disintegrin-like and metalloprotease with thrombospondin type 1 [Affymetrix number 222162_s_at], SEQ ID number 70.

[0166] In diagnostic use, the value of one or more (preferably at least two) of the described genes or their translated proteins are determined, for example, in blood. The determination of RNA in blood is carried out by isolating RNA from citrated plasma, transcription to cDNA, and subsequent PCR. The determination of proteins in blood can be carried out by Western blot, ELISA or Luminex® technology. The values so obtained are compared with the normal value of an individual (or with healthy tissue from the patient) to be able to obtain an early diagnosis of a colorectal carcinoma.

[0167] For detecting a colorectal carcinoma or for early diagnosis, the person skilled in the art investigates preferably at least one, more preferably at least two, and most preferably at least 3 of the marker genes represented here, in the form of their expression profile. Most advantageously, the expression profile is defined by the following genes: LGN protein [Affymetrix number 205240_at], SEQ ID number 25; peroxisome proliferative activated receptor, gamma [Affymetrix number 208510_s_at], SEQ ID number 41, 136, 137 or 138; and glucosaminyl (N-acetyl) transferase 3, mucin type [Affymetrix number 219508_at], SEQ ID number 68.

### EXAMPLE 6

### 55 Genes and a Selection Thereof from Table 3, which are Suitable as Marker Genes for the Detection of a Colorectal Carcinoma

[0168] The values of column 7 in Table 3 (t-test) show a significant differential expression of the 55 described genes for colon mucosas and colorectal carcinomas. From this one discloses the use of these genes as marker genes for the detection of a colorectal carcinoma. Based on a particularly high significance of p<0.05 in the t-test (column 7, Table 3), the following gene selection (18 genes) is particularly well suited for use as marker genes for the detection of a colorectal carcinoma: LGN protein [Affymetrix number 205240_at], SEQ ID number 25; peroxisome proliferative activated receptor, gamma [Affymetrix number 208510_{—}5_at], SEQ ID number 41, 136, 137 or 138; glucosaminyl (N-acetyl) transferase 3, mucin type [Affymetrix number 219508_at], SEQ ID number 68; phosphodiesterase 4B, cAMP-specific (phosphodiesterase E4 dunce homolog, Drosophila) [Affymetrix number 203708_at], SEQ ID number 78 or 157; solute carrier family 26 (sulfate transporter), member 2 [Affymetrix number 205097_at], SEQ ID number 83; pleiomorphic adenoma gene 1 [Affymetrix number 205372_at], SEQ ID number 85; KIAA0672 gene product [Affymetrix number 205414_s_at], SEQ ID number 86; PTK7 protein tyrosine kinase 7 [Affymetrix number 207011_s_at], SEQ ID number 92, 159, 160, 161 of 162; homeobox A9 [Affymetrix number209905_at], SEQ ID number 99 or 170; interleukin 1 receptor, type II [Affymetrix number 211372_s_at], SEQ ID number 101, 171 or 172; protein O-fucosyltransferase 1 [Affymetrix number 212349_at], SEQ ID number 103 or 174; lipocalin 2 (oncogene24p3) [Affymetrix number 212531_at], SEQ ID number 104; paraneoplastic antigen [Affymetrix number 213230_at], SEQ ID number 105; immunoglobulin lambda joining 3 [Affymetrix number 214677_x_at], SEQ ID number 109 or 177; chromosome 14 open reading frame 18 [Affymetrix number 217988_at], SEQ ID number 112, 178, 179 or 180; heparan sulfate (glucosamine) 3-O-sulfotransferase 2 [Affymetrix number 219697_at], SEQ ID number 114; LBP [lipopolysaccharide binding protein] protein; likely ortholog of mouse CRTR-1 [Affymetrix number 219735_s_at], SEQ ID number 115; and aryl hydrocarbon receptor nuclear translocator-like 2 [Affymetrix number 220658_s_at], SEQ ID number 118.

[0169] In diagnostic use, the values of one or more (preferably at least two) of the described genes or their translated proteins are determined, for example in blood, and compared with the normal values of an individual, to allow early diagnosis of a tumor disease. The “normal values of an individual” can be the values of an individual who is not sick, or as mentioned above, of healthy tissue from the sick patient.

### EXAMPLE 7

### Selection of Genes from Tables 2 and 3 which are Particularly Well Suited as Marker Genes for the Detection of a Colorectal Carcinoma

[0170] The precise selection from the 72 genes of Table 2 (Example 5) combined with the gene selection from the 55 genes of Table 3 (Example 6), represents a first “minimal set” of 33 marker genes, which, in reference to a particularly significantly different expression, measured with p<0.05 in the t-test (Table 2 and Table 3, column 7), stands out from the quantity of the total 120 marker genes and is therefore of special diagnostic relevance. The genes are: major histocompatibility complex, class II, DP beta 1 [Affymetrix number 201137_s_at], SEQ ID number 2; CD163 antigen [Affymetrix number 203645_s_at], SEQ ID number 7; phospholipase C, beta 4 [Affymetrix number 203895_at], SEQ ID number 8 or 122; solute carrier family 31 (copper transporters), member 2 [Affymetrix number 204204_at], SEQ ID number 12; group-specific component (vitamin D binding protein) [Affymetrix number 204965_at], SEQ ID number 19; profilin 2 [Affymetrix number 204992_s_at], SEQ ID number 21 or 124; LGN protein [Affymetrix number 205240_at], SEQ ID number 25; arylacetamide deacetylase (esterase) [Affymetrix number 205969_at], SEQ ID number 33; Down syndrome critical region gene 6 [Affymetrix number 207267_s_at], SEQ ID number 38; peroxisome proliferative activated receptor, gamma [Affymetrix number 208510_s_at], SEQ ID number 41, 136, 137 or 138; allograft inflammatory factor 1 [Affymetrix number 209901_x_at], SEQ ID number 45, 139 or 140; major histocompatibility complex, class II, DP alpha 1 [Affymetrix number 211991_s_at], SEQ ID number 49; aldehyde dehydrogenase 1 family, member A1 [Affymetrix number 212224_at], SEQ ID number 50; plexin D1 [Affymetrix number 212235_at], SEQ ID number 51; hypothetical protein PP1665 [Affymetrix number 213343_s_at], SEQ ID number 54; complement component 3 [Affymetrix number 217767_at], SEQ ID number 66; glucosaminyl (N-acetyl) transferase 3, mucin type [Affymetrix number 219508_at], SEQE ID number 68; A disintegrin-like and metalloprotease with thrombospondin type 1 [Affymetrix number 222162_s_at], SEQ ID number 70; phosphodiesterase 4B, cAMP-specific (phosphodiesterase E4 dunce homolog, Drosophila) [Affymetrix number 203708_at], SEQ ID number 78 or 157; solute carrier family 26 (sulfate transporter), member 2 [Affymetrix number 205097_at], SEQ ID number 83; pleiomorphic adenoma gene 1 [Affymetrix number 205372_at], SEQ ID number 85; KIAA0672 [expansion unknown/perhaps, Kasuza Integrative Autoannotation] gene product [Affymetrix number 205414_s_at], SEQ ID number 86; PTK7 protein tyrosine kinase 7 [Affymetrix number 207011_s_at], SEQ ID number 92, 159, 160, 161 or 162; homeobox A9 [Affymetrix number 209905_at], SEQ ID number 99 or 170; interleukin 1 receptor, type II [Affymetrix number 211372_s_at], SEQ ID number 101, 171 or 172; protein O-fucosyltransferase 1 [Affymetrix number 212349_at], SEQ ID number 103 or 174; lipocalin 2 (oncogene 24p3) [Affymetrix number 212531 at], SEQ ID number 104; paraneoplastic antigen [Affymetrix number 213230_at], SEQ ID number 105; immunoglobulin lambda joining 3 [Affymetrix number 214677_x_at], SEQ ID number 109 or 177; chromosome 14 open reading frame 18 [Affymetrix number 217988_at], SEQ ID number 112; heparan sulfate (glucosamine) 3-O-sulfotransferase 2 [Affymetrix number 219697_at], SEQ ID number 114; LBP protein; likely ortholog of mouse CRTR CP-2-related transcriptional response-1 [Affymetrix number 219735_s_at], SEQ ID number 115; and aryl hydrocarbon receptor nuclear translocator-like 2 [Affymetrix number 220658_s_at], SEQ ID number 118. Preferably, one again determines 18 genes from the gene set presented here with 33 genes, where the former 18 genes can be used for the early detection of a colorectal carcinoma. A preferred selection of these 18 marker genes comprises, for example, the genes with SEQ ID NOs: 2, 7, 8 (or 122), 12, 19, 21 (or 124), 25, 33, 38, 41 (or 136, 137, 138), 45 (or 139, 140), 49, 50, 51, 54, 66, 68 and 70 (see also Example 5) or the genes with the SEQ ID NOs: 25, 41 (or 136, 137, 138), 68, 78 (or 157), 83, 85, 86, 92 (or 159, 160, 161, 162), 99 (or 170), 101 (or 171, 172), 103 (or 174), 104, 105, 109 (or 177), 112, 114, 115 and 118 (see also Example 6). The person skilled in the art certainly can use the results represented here for making other diagnostic selections. The possibilities available to him include optionally to determine from the tables in the appendix what the relevant diagnostic marker genes are and to make the appropriate selection. The precise marker selections that are mentioned herein as preferred comprise preferred embodiments. Thus, the person skilled in the art can certainly combine the 18 genes as represented in Example 6.

[0171] By comparing the genes which, according to Table 2 and Table 3, present differential expression between colorectal carcinomas and mucosa, three genes were identified which were taken into consideration in both selections (Example 5 and Example 6), and which present a particularly significant differential expression. These three genes should be considered a preferred embodiment of this invention for the early detection of a colorectal carcinoma. It is preferred to determine at least one of these three genes, more preferably at least two and most preferably all three genes. The person skilled in the art will also make use of the expression of additional genes (for example, chosen from the “minimal sets” of the 72, 55, 33, and 18 genes mentioned here) for the diagnosis. The special selection of these three genes represents an additional “minimal set,” which is of great diagnostic relevance. The genes are: LGN protein [Affymetrix number 205240_at], SEQ ID number 25; peroxisome proliferative activated receptor, gamma [Affymetrix number 208510_s_at], SEQ ID number 41, 136, 137 or 138; glucosaminyl (N-acetyl) transferase 3, and mucin type [Affymetrix number 219508_at], SEQ ID number 68.

[0172] The genes of the “minimal sets” represented here are of particular interest in the framework of a preventive care cancer investigation, because these 33, 18, 18 or three genes are particularly well suited as marker genes for detecting a colorectal carcinoma. Corresponding data can also be obtained from Table B.

[0173] Table B shows the difference in the expression profile/expression level of the defined genes in comparison to the healthy mucosa (Muc) and the tumor tissue (Tu). A “↓” here means that the corresponding gene in mucosa compared to tumors has a low expression level, while “↑” means that the corresponding gene has a higher expression in healthy tissue compared to the tumor tissue. Reversing the conclusion, this means that “↓” in Table B means that the corresponding gene exhibits a higher expression level in the tumor tissue than in the healthy mucosa, and “↑” means that the corresponding gene presents a lower expression level in the tumor tissue than in the healthy mucosa.

[0174] In Example 8 and in the following examples it is shown that the 120 genes (SEQ ID NOs: 1-181) according to the invention are also suitable for detecting a liver metastasis of a colorectal carcinoma. Thus, a liver metastasis dependent upon a colorectal carcinoma, preferably an already diagnosed colorectal carcinoma, can be determined.

### EXAMPLE 8

### The 72 Genes from Table 2 can Also be Used for the Prediction of Liver Metastases of a Colorectal Carcinoma

[0175] The values from column 10 of Table 2 show a differential expression of the 72 genes described, allowing differentiation between a colorectal carcinoma and corresponding liver metastases. In column 2, the t-test between liver metastases compared to the tumor is represented. Therefore, these genes are suitable as marker genes for the prediction of liver metastases in the case of a diagnosed colorectal carcinoma.

### EXAMPLE 9

### Minimal Selection (“Minimal Set”) of Genes from Table 2, which are Particularly Well Suited for the Prediction of Liver Metastases in the Case of a Colorectal Carcinoma

[0176] Taking into consideration the significance starting at a value below 0.05 in the t-test in column 10 of Table 2, 20 genes were identified which presented a particularly clear differential expression between a colorectal carcinoma and corresponding liver metastases (see also Table C, first column). The genes are: aldolase B, fructose-bisphosphate [Affymetrix number 204705_x_at], SEQ ID number 17; group-specific component (vitamin D binding protein) [Affymetrix number 204965_at], SEQ ID number 19; fibrinogen, B beta polypeptide [Affymetrix number 204988_at], SEQ ID number 20; orosomucoid 1 [Affymetrix number 205041_s_at], SEQ ID number 22; alpha-1-microglobulin/bikunin precursor [Affymetrix number 205477_s_at], SEQ ID number 26; fibrinogen A alpha polypeptide [Affymetrix number 205650_s_at], SEQ ID number 29 or 125; coagulation factor II (thrombin) [Affymetrix number 205754_at], SEQ ID number 30; pre-alpha (globulin) inhibitor, H3 polypeptide [Affymetrix number 205755_at], SEQ ID number 31; arylacetamide deacetylase (esterase) [Affymetrix number 205969_at], SEQ ID number 33; asialoglycoprotein receptor 2 [Affymetrix number 206130_s_at], SEQ ID number 35, 133; 134 or 135; amyloid P component, serum [Affymetrix number 206350_at], SEQ ID number 37; haptoglobin [Affymetrix number 208470_s_at], SEQ ID number 40; alpha-1 antitrypsin [Affymetrix number 211429_s_at], SEQ ID number 48, 151 or 152; transferrin [Affymetrix number 214063_s_at], SEQ ID number 58; complement component 4A [Affymetrix number 214428_x_at], SEQ ID number 59; similar to human Ig rearranged gamma chain mRNA, V-J-C region [Affymetrix number 214669_x_at], SEQ ID number 64; complement component 3 [Affymetrix number 217767_at], SEQ ID number 66; fibrinogen, gamma polypeptide [Affymetrix number 219612_s_at], SEQ ID number 69 or 156; C-reactive protein, pentraxin-related [Affymetrix number 37020_at], SEQ ID number 71; and hemopexin [Affymetrix number 39763_at] SEQ ID number 72.

[0177] The above-mentioned 20 genes represent a particularly suitable selection which, in the framework of a standard investigation of these marker genes, allows investigation for the presence or growth of liver metastases due to a primary colorectal carcinoma. In the corresponding expression profile/expression level of an individual gene to be determined in Table C, the “↑” means that the corresponding gene is upregulated in the metastases compared to the primary tumor, while “↓” means that the corresponding gene is down-regulated.

### EXAMPLE 10

### The 55 Genes from Table 3 can be Used for the Prediction of Liver Metastases in the Case of a Diagnosed Colorectal Carcinoma

[0178] The values from column 10 of Table 3 show a differential expression of the 55 genes described, allowing the differentiation between a colorectal carcinoma and corresponding liver metastases. Therefore, these genes are suitable as marker genes for the prediction of liver metastases in the case of an already diagnosed colorectal carcinoma; see Table 3.

### EXAMPLE 11

### Minimum Selection of Genes from Table 3 which are Particularly Well Suited for the Prediction of Liver Metastases in the Case of a Diagnosed Colorectal Carcinoma

[0179] Taking into consideration the significance starting at a value below 0.05 in the t-test in column 10 of Table 3, two genes were identified which produce a particularly clear differential expression between a colorectal carcinoma and corresponding liver metastases. The genes are: tenascin C (hexabrachion) [Affymetrix number 201645_at], SEQ ID number 74; immunoglobulin lambda joining 3 [Affymetrix number 214677_x_at], SEQ ID number 109 or 177; see also Table C. In the corresponding expression profile/expression level of an individual gene to be determined in Table C, “↑” means that the corresponding gene in the metastasis is upregulated compared to the primary tumor, while “↓” means that the gene is correspondingly down-regulated.

[0180] The above-mentioned two genes represent a particularly suitable selection which, in the framework of a standard investigation of these marker genes, allows the investigation of the growth of liver metastases due to a primary colorectal carcinoma.

[0181] It is preferred for these two genes to be optionally combined with other genes for corresponding diagnostics. In preferred diagnostics, these two genes are combined with at least one additional gene from Table C, Table 2 and/or Table 3; however, other genes of the SEQ ID NOs 1-73, 75-108, 110-176 and 178-181 are used for diagnosis. The corresponding information can also be found in column 10 of Tables 2 and 3.

### EXAMPLE 12

### Selection of genes of Tables 2 and 3 which are Particularly Well Suited for the Prediction of Liver Metastases in the Case of a Diagnosed Colorectal Carcinoma

[0182] The total of the 20 genes selected from Table 2 and the two genes selected from Table 3 represent the preferred “minimal set” of marker genes, and are therefore of very great diagnostic significance; see also Table C with the corresponding explanations in the preceding examples. The genes are: aldolase B, fructose-bisphosphate [Affymetrix number 204705_x_at], SEQ ID number 17; group-specific component (vitamin D binding protein) [Affymetrix number 204965_at], SEQ ID number 19; fibrinogen, B beta polypeptide [Affymetrix number 204988_at], SEQ ID number 20; orosomucoid 1 [Affymetrix number 205041_s_at], SEQ ID number 22; alpha-1-microglobulinlbikunin precursor [Affymetrix number 205477_s_at], SEQ ID number 26; fibrinogen A alpha polypeptide [Affymetrix number 205650_at], SEQ ID number 29 or 125; coagulation factor II (thrombin) [Affymetrix number 205754_at], SEQ ID number 30; pre-alpha (globulin) inhibitor, H3 polypeptide [Affymetrix number 205755_at], SEQ ID number 31; arylacetamide deacetylase (esterase) [Affymetrix number 205969_at], SEQ ID number 33; asialoglycoprotein receptor 2 [Affymetrix number 206130_s_at], SEQ ID number 35, 133, 134 or 135; amyloid P component, serum [Affymetrix number 206350_at], SEQ ID number 37; haptoglobin [Affymetrix number 208470_s_at], SEQ ID number 40; alpha-1 antitrypsin [Affymetrix number 211429_s_at], SEQ ID number 48, 151 or 152; transferrin [Affymetrix number 214063_s_at], SEQ ID number 58; complement component 4A [Affymetrix number 214428_x_at], SEQ ID number 59; similar to human Ig rearranged gamma chain mRNA, V-J-C region [Affymetrix number 214669_x_at], SEQ ID number 64; complement component 3 [Affymetrix number 217767_at], SEQ ID number 66; fibrinogen, gamma polypeptide [Affymetrix number 219612_s_at], SEQ ID number 69 or 156; C-reactive protein, pentraxin-related [Affymetrix number 37020_at], SEQ ID number 71; hemopexin [Affymetrix number 39763_at] SEQ ID number 72; tenascin C (hexabrachion) [Affymetrix number 201645_at], SEQ ID number 74; and immunoglobulin lambda joining 3 [Affymetrix number 214677_x_at], SEQ ID number 109 or 177.

[0183] The investigation of the expression level of these selected genes is of particularly great interest in the case of a diagnosed colorectal carcinoma, because the 22 genes can be used particularly well as marker genes for the detection of already pronounced, corresponding liver metastases.

[0184] The following examples demonstrate that the 120 genes identified here can also be used for the determination/prediction of the therapy course of a 5-FU-containing chemotherapy in the treatment of metastases, particularly of liver metastases.

[0185] Here, in the following examples, the investigation of liver metastases is emphasized.

### EXAMPLE 13

### 72 Genes from Table 1 which are Suitable for the Prediction of the Therapy Course of Patients with Liver Metastases of a Colorectal Carcinoma, in the Case of a 5-FU-Containing Chemotherapy or Combination Therapy

[0186] Comparing the gene expression in liver metastases of a colorectal carcinoma between patients who respond to a 5-FU-containing chemotherapy (“responder”) and patients who do not respond to a 5-FU-containing chemotherapy (“non-responder”), a significant differential expression was identified with 72 genes, see also Table 1 and Table A, first column.

[0187] One or more of the described genes, gene fragments, complementary nucleic acids or translated proteins are therefore well suited for predicting the efficacy of a 5-FU-based chemotherapy or combination therapy (5-FU, for example, in combination with folic acid, irinotecan, oxaliplatin and others).

[0188] In Table A, it is shown for this example (and the following examples) that the expression level of the individual genes can be determined and that a distinction can be made, particularly between “responders” and “non-responders.” Data for the 120 genes according to the invention are listed in Tables 1 and 4.

[0189] Table A is a representation of the genes that should be analyzed preferably. Here “t” means that the corresponding gene of patients who respond to a 5-FU-containing chemotherapy and/or combination therapy (“responders”) is expressed more strongly (“upregulated”) in comparison to patients who do not respond (“non-responders”). In contrast, the “↓” denotes a weaker expression of the corresponding gene in “responders” versus “non-responders.”

[0190] In general, in the context of this invention, the term expression level thus means a measurable value to be determined for the expression of the gene to be investigated, where this value, as shown in the tables and in Example 2, relates to the expression profile of the RNA in the sample. However, the methods represented here (for detecting a colorectal carcinoma, for predicting metastases, and also for predicting the response to a 5-FU therapy) can determine the expression level by other analyses (for example, determination of the protein quantity, the proteins, peptides or peptide segments coded by the genes SEQ ID NOs: 1-181). These analyses comprise, for example, and in a nonlimiting list, immunodetection methods such as Western blot, ELISA, RIA, immunoprecipitation, and also FACS analyses.

### EXAMPLE 14

### 55 Genes from Table 4 which are Suitable for the Prediction of the Therapy Course of Patients with Liver Metastases of a Colorectal Carcinoma, in the Case of a 5-FU-Containing Chemotherapy or Combination Therapy

[0191] By comparing the gene expression in liver metastases of a colorectal carcinoma between patients who respond to a 5-FU-containing chemotherapy and patients who do not respond to a 5-FU-containing chemotherapy, a significant differential expression was identified with 55 genes; see Table 4 and Table A (second column).

[0192] One or more of the described genes, gene fragments, complementary nucleic acids or translated proteins therefore are well suited for predicting the efficacy of a 5-FU-based chemotherapy or combination therapy (5-FU, for example, in combination with folic acid, irinotecan, oxaliplatin and others).

### EXAMPLE 15

### Selection of Genes from Tables 1 and 4 which can be Used as Marker Genes for Predicting the Therapy Course of Patients with Liver Metastases of a Colorectal Carcinoma in the Case of a 5-FU-Containing Chemotherapy or Combination Therapy

[0193] By comparing the gene expression in liver metastases of a colorectal carcinoma between patients who respond to a 5-FU-containing chemotherapy and patients who do not correspond to a 5-FU-containing chemotherapy, taking into consideration the significance levels in the comparative statistical analysis (t-, Welsh and Wilcoxon test); see Table A, columns 7, 8, 9 and 10, a total of 34 particularly significantly differentially expressed genes were identified in Tables 1 and 4. In addition to the statistical selection for reducing the gene list, the data from the “principal component analysis” (PCA) were also used. “Principal component analysis” (PCA) is a method which allows the classification of variables, based on correlative relationships, into mutually independent groups, and a reduction of the given existing dimensions to a few basic components. The result of the factor analysis yields mutually independent factors which explain the connections between the variables that are combined in them. Thus, it is a data reduction and hypothesis generating method which is suitable for verifying the dimensionality of complex characteristics. Using the “charges” (similar genes) of the individual constructs on the main components, the contents of the dimensions can be defined. In the framework of the factor analysis method, charges provide general information regarding how good a variable is with respect to a variable group. Here, those genes were not taken into consideration for the selection of the 28 genes in Table A, column 4, which in the first selection, see Table A, columns 1 and 2, presented a clear separation between liver metastases and primary tumor, independently of their predictive potential or response. Thus, the genes represented here represent the optimum with respect to response prediction and statistical significance.

[0194] These genes are: apolipoprotein E [Affymetrix number 203382_s_at], SEQ ID number 6; CD163 antigen [Affymetrix number 203645_s_at], SEQ ID number 7; phospholipase C, beta 4 [Affymetrix number 203895_at], SEQ ID number 8 or 122; chromosome 11 open reading frame 9 [Affymetrix number 204073_at], SEQ ID number 10; apolipoprotein C-I [Affymetrix number 204416_x_at], SEQ ID number 13; sialyl transferase [Affymetrix number 204542_at], SEQ ID number 14; coagulation factor C homolog, cochlin (Limuluspolyphemus) [Affymetrix number 205229_s_at], SEQ ID number 24; LGN protein [Affymetrix number 205240_at], SEQ ID number 25; peroxisome proliferative activated receptor, gamma [Affymetrix number 208510_s_at], SEQ ID number 41, 136, 137 or 138; allograft inflammatory factor 1 [Affymetrix number 209901_x_at], SEQ ID number 45, 139 or 140; hyaluronoglucosamimidase 1 [Affymetrix number 210619_s_at], SEQ ID number 46, 141, 142, 143, 144, 145, 146 or 147; alpha-1 antitrypsin [Affymetrix number 211429_s_at], SEQ ID number 48, 151 or 152; low density lipoprotein receptor-related protein 4 [Affymetrix number 212850_s_at], SEQ ID number 52; hypothetical protein PP1665 [Affymetrix number 213343_s_at], SEQ ID number 54; serum amyloid A2 [Affymetrix number 214456_x_at], SEQ ID number 60; orosomucoid 2 [Affymetrix number 214465_at], SEQ ID number 61; eyes absent homolog 1 (Drosophila) [Affymetrix number 214608_s_at], SEQ ID number 63, 153, 154 or 155; H factor (complement)-like 1 [Affymetrix number 215388_s_at], SEQ ID number 65; complement component 3 [Affymetrix number 217767_at], SEQ ID number 66; glucosaminyl (N-acetyl) transferase 3, mucin type [Affymetrix number 219508_at], SEQ ID number 68; fascin homolog 1, actin-bundling protein (Strongylocentrotus purpuratus) [Affymetrix number 201564_s)at], SEQ ID number 73; phosphodiesterase 4B, cAMP-specific (phosphodiesterase E4 dunce homolog, Drosophila) [Affymetrix number 203708_at], SEQ ID number 78 or 157; biliverdin reductase A [Affymetrix number 203771_s_at], SEQ ID number 79; IGF-II mRNA-binding protein 3 [Affymetrix number 203819_s_at], SEQ ID number 80; cathepsin E [Affymetrix number 205927_s_at], SEQ ID number 89 or 181; keratin 6A [Affymetrix number 209125_at], SEQ ID number 97, 167 or 168; spondin 1, (f-spondin) extracellular matrix protein [Affymetrix number 209436_at], SEQ ID number 98 or 169; interleukin 1 receptor, type II [Affymetrix number 211372_s_at], SEQ ID number 101, 171 or 172; lipocalin 2 (oncogene 24p3) [Affymetrix number 212531_at], SEQ ID number 104; G protein-coupled receptor 49 [Affymetrix number 213880_at], SEQ ID number 107; spondin 1, (f-spondin) extracellular matrix protein [Affymetrix number 213994_s_at], SEQ ID number 108 or 176; frizzled homolog 10 (Drosophila) [Affymetrix number 219764_at], SEQ ID number 116; deafness locus associated putative guanine nucleotide exchange factor [Affymetrix number 220482_s_at], SEQ ID number 117; CDW52 antigen (CAMPATH-1 antigen) [Affymetrix number 34210_at], SEQ ID number 120.

[0195] Accordingly, the invention preferably represents a selection of the 120 represented genes, namely 34, preferably 28 genes, which can be used particularly for determining the responsiveness to 5-FU-containing therapies. Also, in the sense of this invention, the “responsiveness” to a 5-FU-containing chemotherapy/combination therapy determines the expression profile of specific serum markers in blood. These serum markers as well are contained in the 120 marker genes defined herein, and they comprise particularly the following marker genes (and their variants and homologs): complement component 1, q subcomponent, beta polypeptide [Affymetrix number 202953 at], SEQ ID number 4; apolipoprotein E [Affymetrix number 203382_s_at], SEQ ID number 6; apolipoprotein C-I [Affymetrix number 204416_x_at], SEQ ID number 13; coagulation factor V (proaccelerin, labile factor) [Affymetrix number 204714_s_at], SEQ ID number 18; fibrinogen, B beta polypeptide [Affymetrix number 204988_at], SEQ ID number 20; orosomucoid 1 [Affymetrix number 205041_s_at], SEQ ID number 22; apolipoprotein B (including Ag(x) antigen) [Affymetrix number 205108_s_at], SEQ ID number 23; fibrinogen, A alpha polypeptide [Affymetrix number 205650_s_at], SEQ ID number 29; coagulation factor II (thrombin) [Affymetrix number 205754_at], SEQ ID number 30; transferrin [Affymetrix number 214063_s_at], SEQ ID number 58; complement component 4A [Affymetrix number 214428_x_at], SEQ ID number 59; serum amyloid A2 [Affymetrix number 214456_x_at], SEQ ID number 60; orosomucoid 2 [Affymetrix number 214465 at], SEQ ID number 61; complement component 3 [Affymetrix number 217767_at], SEQ ID number 66; complement component 1, q subcomponent, alpha polypeptide [Affymetrix number 218232_at], SEQ ID number 67; fibrinogen, gamma polypeptide [Affymetrix number 219612_s_at], SEQ ID number 69; C-reactive protein, pentraxin-related [Affymetrix number 37020_at], SEQ ID number 71.

[0196] One or more (preferably at least two, more preferably at least three) of the described genes, gene fragments, complementary nucleic acids or translated proteins are therefore particularly well suited for predicting the efficacy of a 5-FU-based chemotherapy or combination therapy (5-FU, for example, in combination with folic acid, irinotecan, oxaliplatin and others). In the selection of at least three genes, preferred genes include genes 10, 14, 25, 41, 52, 63, 68 represented in the SEQ ID NOs: chromosome 11 open reading frame 9 [Affymetrix number 204073_s_at], SEQ ID number 10; sialyl transferase [Affymetrix number 204542_at], SEQ ID number 14; LGN protein [Affymetrix number 205240_at], SEQ ID number 25; peroxisome proliferative activated receptor, gamma [Affymetrix number 208510_s_at], SEQ ID number 41, 136, 137 or 138; low density lipoprotein receptor-related protein 4 [Affymetrix number 212850_s_at], SEQ ID number 52; eyes absent homolog 1 (Drosophila) [Affymetrix number 214608_s_at], SEQ ID number 63, 153, 154 or 155; glucosaminyl (N-acetyl) transferase 3, mucin type [Affymetrix number 219508_at], SEQ ID number 68.

### EXAMPLE 16

### Individual Therapy of Liver Metastases of a Colorectal Carcinoma, Derived from the Expression Data of the Respective Patients

[0197] Mr. T. is a 42-year-old patient who was diagnosed in July 2003 with a subtotal stenosing sigma carcinoma with liver metastasis. The primary tumor was resected completely (RO) on Jul. 18, 2003, and at the same time a biopsy was carried out from one of the liver metastases. This liver metastasis was subjected to a laser microdissection (according to Examples 1-4), the RNA was isolated and amplified. Then the amplified RNA was hybridized on an Affymetrix chip HG U133-A, and the expression profile was read. The result of the analysis was fixed on Sep. 5, 2003 (see Table 5, column 4), and it yielded a gene signature which predicts a good response (Examples 13-15).

[0198] After the surgery, the patient was treated for the entire 2 weeks with a palliative chemotherapy consisting of folic acid and 5-fluorourcil [sic; 5-fluorouracil] by 24-h infusion (AIO regimen), as well as with oxaliplatin. On Aug. 6, 2004, the first cycle of the treatment was started, and at the time of the first check of the tumor response by computer tomography (CT) on Sep. 24, 2003, a response to the chemotherapy was already found. After the completion of the second cycle, a partial remission (a decrease of the size of the liver metastases by >50%) was achieved. Therefore, a third and a fourth cycle of this chemotherapy (CTx) were administered. The provisionally last check of the tumor response took place on Mar. 23, 2004. The reference metastasis has reduced in size from originally (CT finding of Aug. 4, 2003; prior to chemotherapy) 12.9×9.0 cm to now 4.2×7.6 cm (CT finding of Mar. 25, 2004; after 4 chemotherapy cycles) (reduction by 72.6%; corresponds to a partial remission according to WHO criteria). The CT findings of this patient, prior to chemotherapy and after the 4th chemotherapy cycle, can be found in FIG. 5. The sizes of the other liver metastases also regressed, and no new metastases occurred. The patient is alive today (May 2004), and a secondary curative metastasis operation is even under discussion.

[0199] The gene expression profiles, as described in Examples 13-15, were tested prospectively on this patient, because the result of the investigations was completed already on Sep. 5, 2004, that is 15 days before the first tumor check under chemotherapy, and the gene expression profile correctly predicted the response to the therapy; see Table 5.

### EXAMPLE 17

### The Validation of the Marker Genes Also Defines SEQ ID NOS: 25, 41 and 68 as Diagnostic Markers for Colorectal Carcinoma

[0200] For the additional validation of the above-mentioned results, preoperative biopsies were carried out on the normal colon mucosa and rectum mucosa, respectively, and biopsies of the tumors were removed from an independent set of 12 patients with colorectal carcinoma. After the collection of the biopsies, they were immediately deep frozen in liquid nitrogen and then archived at −80° C.

[0201] The samples were then treated as described in Examples 1-3, that is the RNA was extracted from the samples, the RNA was amplified and labeled, and hybridized with HG U133-A Microarrays from Affymtrix [sic; Affymetrix]. The work steps to perform the procedures mentioned were carried out according to the indications given in the Handbook for Gene Expression Analysis (Affymetrix). The signal intensities and the detection signals (“detection calls”) were prepared with the help of the GeneChip 5.0 Software from Affymetrix.

[0202] The data of the “minimal sets” of diagnostic markers which are described here for detecting colorectal carcinoma, and which comprise the expression profile of the marker genes defined by Seq ID 25, 41 and 68 and 136-138, were now validated using the above-described set. For this purpose, using the Affy numbers, the corresponding expression values of the 12 mucosa-tumor pairs were determined, and the fold change and the t-test (p<0.05) of the pairs were calculated. As can be seen in Table 6, for the three genes characterized by SEQ NOS: 5, 41 and 68, a significant difference between mucosa and tumor was found. It is worth noting here that of the difference the direction (direction Tu vs Muc) also agrees with Table 2, that is the gene with Seq ID 25 is upregulated in the tumor (compared to the normal tissue), and the gene of Seq ID 41 and 68 is downregulated in the tumor (in comparison to the normal tissue). Thus, it has been shown that the methods described herein, particularly the gene sets characterized herein, and most particularly the “minimal sets” are capable of exactly differentiating tumor from mucosa with a precision of exactly 100% in an independent group of n=12 colorectal carcinomas.

### Tables

TABLE 1
Expression data after statistical evaluation according to Example 4a of responder (Resp)
versus non-responder (Non-Resp) to a 5-FU containing palliative chemotherapy

| \textcircled{1} | | | | Spalte 5 | | Spalte 7 | | |
|---|---|---|---|---|---|---|---|---|
| Spalte 1 | | | Spalte 4 | Fc_Resp | Spalte | Direction | | |
| SEQ | | Spalte 3 | Avg | vs | 6 | Non- | | |
| ID | Spalte 2 | Avg | Non- | Non- | T- | Resp vs | Spalte 8 | Spalte 9 |
| NO: | Affy Nr | Responder | Responder | Resp | Test | Resp | Gene name | Gene |
| 1 | 200954_at | 145.65 | 519.68 | −3.57 | 0.027 | Up | ATPase, H+ transporting, lysosomal 16 kDa, | ATP6V0C |
| | | | | | | | V0 subunit c | |
| 2 | 201137_s_at | 1293.3 | 5177.28 | −4 | 0.045 | Up | major histocompatibility complex, class II, DP | HLA-DPB1 |
| | | | | | | | beta 1 | |
| 3 | 201842_s_at | 871.47 | 3299.13 | −3.79 | 0.029 | Up | EGF-containiag fibulin-like extracellular matrix | EFEMP1 |
| | | | | | | | protein 1 | |
| 4 | 202953_at | 305.67 | 1092.85 | −3.58 | 0.033 | Up | complement component 1, q subcomponent, | C1QB |
| | | | | | | | beta polypeptide | |
| 5 | 202990_at | 174.3 | 768.48 | −4.41 | 0.014 | Up | phosphorylase, glycogen; liver (Hers disease) | PYGL |
| 6 | 203382_s_at | 132.48 | 513.97 | −3.88 | 0.001 | Up | apolipoprotein E | APOE |
| 7 | 203645_s_at | 353.65 | 1385.95 | −3.92 | 0.029 | Up | CD163 antigen | CD163 |
| 8 | 203895_at | 12464.9 | 2658.78 | 4.69 | 0.001 | Down | phospholipase C, beta 4 | PLCB4 |
| 9 | 203939_at | 448.4 | 1686.73 | −3.76 | 0.036 | Up | 5′-nucleotidase, ecto (CD73) | NT5E |
| 10 | 204073_s_at | 359.77 | 1108.27 | −3.08 | 0.029 | Up | chromosome 11 open reading frame 9 | C11orf9 |
| 11 | 204143_s_at | 469.02 | 1854.93 | −3.95 | 0.029 | Up | rTS beta protein | HSRTSBETA |
| 12 | 204204_at | 148.08 | 488.2 | −3.3 | 0.004 | Up | solute carrier family 31 (copper transporters), | SLC31A2 |
| | | | | | | | member 2 | |
| 13 | 204416_x_at | 856.1 | 3347.48 | −3.91 | 0.002 | Up | apolipoprotein C-I | APOCI |
| 14 | 204542_at | 119.03 | 432.17 | −3.63 | 0.038 | Up | sialyltransferase | STHM |
| 15 | 204584_at | 389.25 | 70.62 | 5.51 | 0.014 | Down | L1 cell adhesion molecule (hydrocephalus, | L1CAM |
| | | | | | | | stenosis of aqueduct of Sylvius I) | |
| 16 | 204698_at | 181.85 | 590.4 | −3.25 | 0.027 | Up | interferon stimulated gene 20 kDa | ISG20 |
| 17 | 204705_x_at | 270.88 | 1495.58 | −5.52 | 0.029 | Up | aldolase B, fructose-bisphosphate | ALDOB |
| 18 | 204714_s_at | 231.23 | 1197.85 | −5.18 | 0.005 | Up | coagulation factor V (proaccelerin, labile | F5 |
| | | | | | | | factor) | |
| 19 | 204965_at | 359.55 | 1387.28 | −3.86 | 0.027 | Up | group-specific component (vitamin D binding | GC |
| | | | | | | | protein) | |
| 20 | 204988_at | 2708 | 13973.72 | −5.16 | 0.031 | Up | fibrinogen, B beta polypeptide | FGB |
| 21 | 204992_s_at | 4082.15 | 905.9 | 4.51 | 0.024 | Down | profilin 2 | PFN2 |
| 22 | 205041_s_at | 196.2 | 2513.82 | −12.81 | 0.021 | Up | orosomucoid 1 | ORM1 |
| 23 | 205108_s_at | 209.98 | 845.3 | −4.03 | 0.025 | Up | apolipoprotein B (including Ag(x) antigen) | APOB |
| 24 | 205229_s_at | 804.8 | 209.83 | 3.84 | 0.029 | Down | coagulation factor C homolog, cochlin ( | COCH |
| | | | | | | | Limulus polyphemus) | |
| 25 | 205240_at | 1539.52 | 435.67 | 3.53 | 0.005 | Down | LGN protein | LGN |
| 26 | 205477_s_at | 283.2 | 1155.3 | −4.08 | 0.017 | Up | alpha-1-microglobulin/bikunin precursor | AMBP |
| 27 | 205522_at | 726.27 | 133.53 | 5.44 | 0.005 | Down | homeo box D4 | HOXD4 |
| 28 | 205604_at | 462.38 | 102.25 | 4.52 | 0.022 | Down | homeo box D9 | HOXD9 |
| 29 | 205650_s_at | 493.55 | 2904.28 | −5.88 | 0.041 | Up | fibrinogen. A alpha polypeptide | FGA |
| 30 | 205754_at | 209.75 | 662.38 | −3.16 | 0.026 | Up | coagulation factor II (thrombin) | F2 |
| 31 | 205755_at | 141.5 | 680.27 | −4.81 | 0.037 | Up | pre-alpha (globulin) inhibitor, H3 polypeptide | ITIH3 |
| 32 | 205923_at | 227.28 | 807.67 | −3.55 | 0.02 | Up | reelin | RELN |
| 33 | 205969_at | 175.48 | 757.43 | −4.32 | 0.04 | Up | arylacetamide deacetylase (esterase) | AADAC |
| 34 | 206042_x_at | 896.6 | 212.67 | 4.22 | 0.014 | Down | small nuclear ribonucleoprotein polypeptide N | SNRPN |
| 35 | 206130_s_at | 124.9 | 477.2 | −3.82 | 0.02 | Up | asialoglycoprotein receptor 2 | ASGR2 |
| 36 | 206287_s_at | 24.95 | 372.38 | −14.93 | 0.029 | Up | inter-alpha (globulin) inhibitor H4 (plasma | ITIH4 |
| | | | | | | | Kallikrein-sensitive glycoprotein) | |
| 37 | 206350_at | 555.53 | 2352.27 | −4.23 | 0.038 | Up | amyloid P component, serum | APCS |
| 38 | 207267_s_at | 575.88 | 164.03 | 3.51 | 0.029 | Down | Down syndrome critical region gene 6 | DSCR6 |
| 39 | 207761_s_at | 1638.63 | 5869 | −3.58 | 0.029 | Up | DKFZP586A0522 protein | DKFZP586A0522 |
| 40 | 208470_s_at | 1226.9 | 15875.23 | −12.94 | 0.012 | Up | haptoglobin | HP |
| 41 | 208510_s_at | 3005.18 | 776.35 | 3.87 | 0.023 | Down | peroxisome proliferative activated receptor, | PPARG |
| | | | | | | | gamma | |
| 42 | 208962_s_at | 1947.03 | 556.83 | 3.5 | 0.029 | Down | fatty acid desaturase 1 | FADS1 |
| 43 | 209555_s_at | 74.35 | 315.28 | −4.24 | 0.014 | Up | CD36 antigen (collagen type 1 receptor, | CD36 |
| | | | | | | | thrombospondin receptor) | |
| 44 | 209699_x_at | 709.47 | 3046.28 | −4.29 | 0.014 | Up | aldo-keto reductase family 1, member C2 | AKR1C2 |
| | | | | | | | (dihydrodiol dehydrogenase 2) | |
| 45 | 209901_x_at | 46.32 | 346.83 | −7.49 | 0.042 | Up | allograft inflammatory factor 1 | AIF1 |
| 46 | 210619_s_at | 37.33 | 301.33 | −8.07 | 0.02 | Up | hyaluronoglucosaminidase 1 | HYAL1 |
| 47 | 211367_s_at | 88.02 | 393.8 | −4.47 | 0.029 | Up | caspase 1, apoptosis-related cysteine protease | CASP1 |
| | | | | | | | (ICE-1) | |
| 48 | 211429_s_at | 3552.52 | 19699.27 | −5.55 | 0.017 | Up | alpha-1 Antitrypsin | SERPINA1 |
| 49 | 211991_s_at | 229.8 | 1334.97 | −5.81 | 0.037 | Up | major histocompatibility complex, class II, DP | HLA-DPA1 |
| | | | | | | | alpha 1 | |
| 50 | 212224_at | 141.23 | 716.03 | −5.07 | 0.029 | Up | aldehyde dehydrogenase 1 family, member A1 | ALDH1A1 |
| 51 | 212235_at | 135.98 | 575.18 | −4.23 | 0.013 | Up | plexin D1 | PLXND1 |
| 52 | 212850_s_at | 3434.2 | 1111.52 | 3.09 | 0.043 | Down | low density lipoprotein receptor-related | LRP4 |
| | | | | | | | protein 4 | |
| 53 | 213204_at | 192.18 | 930.65 | −4.84 | 0.029 | Up | p53-associated parkin-like cytoplasmic protein | PARC |
| 54 | 213343_s_at | 419.13 | 119.17 | 3.52 | 0.029 | Down | hypothetical protein PP1665 | PP1665 |
| 55 | 213568_at | 145.08 | 454.45 | −3.13 | 0.037 | Up | odd-skipped-related 2A protein | OSR2 |
| 56 | 213592_at | 329.2 | 1239.5 | −3.77 | 0.017 | Up | angiotensin II receptor-like 1 | AGTRL1 |
| 57 | 213988_s_at | 1016.7 | 3291.8 | −3.24 | 0.047 | Up | spermidine/spermine N1-acetyltransferase | SAT |
| 58 | 214063_s_at | 237.9 | 1677.93 | −7.05 | 0.046 | Up | transferrin | TF |
| 59 | 214428_x_at | 779.75 | 2975.48 | −3.82 | 0.005 | Up | complement component 4A | C4A |
| 60 | 214456_x_at | 264.88 | 4909.38 | −18.53 | 0.038 | Up | serum amyloid A2 | SAA2 |
| 61 | 214465_at | 66.25 | 762.43 | −11.51 | 0.026 | Up | orosomucoid 2 | ORM2 |
| 62 | 214604_at | 1215.43 | 131.85 | 9.22 | 0.005 | Down | homeo box D11 | HOXD11 |
| 63 | 214608_s_at | 572.88 | 28.28 | 20.26 | 0.014 | Down | eyes absent homolog 1 (Drosophila) | EYA1 |
| 64 | 214669_x_at | 200.98 | 624.15 | −3.11 | 0.038 | Up | similar to Human Ig rearranged gamma chain | na |
| | | | | | | | mRNA, V-J-C region | |
| 65 | 215388_s_at | 336.75 | 1303.15 | −3.87 | 0.021 | Up | H factor (complement)-like 1 | HFL1 |
| 66 | 217767_at | 953.25 | 5588.37 | −5.86 | 0.038 | Up | complement component 3 | C3 |
| 67 | 218232_at | 93.93 | 390.22 | −4.15 | 0.005 | Up | complement component 1, q subcomponent, | C1QA |
| | | | | | | | alpha polypeptide | |
| 68 | 219508_at | 2260.57 | 9751.88 | −4.31 | 0.046 | Up | glucosaminyl (N-acetyl) transferase 3, mucin | GCNT3 |
| | | | | | | | type | |
| 69 | 219612_s_at | 1133.45 | 7741.42 | −6.83 | 0.038 | Up | fibrinogen, gamma polypeptide | FGG |
| 70 | 222162_s_at | 183.68 | 646.53 | −3.52 | 0.029 | Up | a disintegrin-like and metalloprotease with | ADAMTS1 |
| | | | | | | | thrombospondin type 1 | |
| 71 | 37020_at | 462.3 | 3024.4 | −6.54 | 0.029 | Up | C-reactive protein, pentraxin-related | CRP |
| 72 | 39763_at | 185.4 | 988.95 | −5.33 | 0.021 | Up | hemopexin | HPX |

Key: \textcircled{1} Column
Description for Table 1
Table 1 lists all 72 genes which are relevant, after the evaluation of the raw data according to the statistical procedure from Example 4a, for a comparison of the gene expression of responders (Resp) with that of non-responders (Non-Resp) in reference to a response to a 5-FU-containing palliative chemotherapy in metastasized colorectal carcinoma.
Column 1 contains the SEQ ID NOS of the gene
Column 2 contains the Affymetrix Accession Numbers on the HG U-133-A Microarray
Column 3 contains the mean values of the gene expression of (n = 8) responders
Column 4 contains the mean values of the gene expression of (n = 9) non-responders
Column 5 contains the differences in the gene expression between responders and non-responders, indicated as fold-change (Fc)
Column 6 shows the significance level in the t-test
Column 7 shows whether the individual genes in the non-responders have been upregulated (up) or downregulated (down) (in comparison to the responders)
Column 8 contains the names of the genes
Column 9 contains the gene symbol

TABLE 2
Expression data colon mucosa (Muc) versus colorectal primary tumor (Tu) versus liver
metastasis (Lm) after statistical evaluation according to Example 4a

| \textcircled{1} | | | | | | Spalte 7 | |
|---|---|---|---|---|---|---|---|
| Spalte 1 | | | | | Spalte 6 | T- | Spalte 8 |
| SEQ | | Spalte 3 | Spalte 4 | Spalte 5 | Fc_Tu | Test | Direction |
| ID | Spalte 2 | Avg | Avg | Avg | vs | Tu vs | Tu vs |
| NO:. | Affy Nr | Mucosa | Tumor | Metastase | Muc | Muc | Muc |
| 1 | 200954_at | 408.70 | 372.73 | 397.40 | 1.10 | 0.839 | None |
| 2 | 201137_s_at | 17222.77 | 3310.17 | 2739.40 | 5.20 | 0.021 | Down |
| 3 | 201842_s_at | 5613.23 | 2293.00 | 1782.83 | 2.45 | 0.205 | None |
| 4 | 202953_at | 2334.17 | 794.47 | 600.64 | 2.94 | 0.103 | None |
| 5 | 202990_at | 572.30 | 426.02 | 533.91 | 1.34 | 0.369 | None |
| 6 | 203382_s_at | 498.80 | 249.17 | 290.08 | 2.00 | 0.241 | None |
| 7 | 203645_s_at | 2161.43 | 910.36 | 895.28 | 2.37 | 0.005 | Down |
| 8 | 203895_at | 2763.03 | 8833.41 | 7288.26 | −3.20 | 0.048 | Up |
| 9 | 203939_at | 1591.57 | 1376.01 | 1061.64 | 1.16 | 0.632 | None |
| 10 | 204073_s_at | 449.53 | 441.00 | 703.39 | 1.02 | 0.950 | None |
| 11 | 204143_s_at | 1458.70 | 956.46 | 1467.93 | 1.53 | 0.287 | None |
| 12 | 204204_at | 827.57 | 438.22 | 327.87 | 1.89 | 0.011 | Down |
| 13 | 204416_x_at | 974.17 | 915.77 | 1945.07 | 1.06 | 0.882 | None |
| 14 | 204542_at | 258.77 | 218.93 | 224.52 | 1.18 | 0.742 | None |
| 15 | 204584_at | 250.57 | 118.13 | 181.68 | 2.12 | 0.191 | None |
| 16 | 204698_at | 1465.67 | 242.37 | 310.35 | 6.05 | 0.197 | None |
| 17 | 204705_x_at | 567.47 | 265.38 | 869.25 | 2.14 | 0.541 | None |
| 18 | 204714_s_at | 215.23 | 264.31 | 650.14 | −1.23 | 0.678 | None |
| 19 | 204965_at | 124.07 | 63.37 | 925.61 | 1.96 | 0.011 | Down |
| 20 | 204988_at | 182.17 | 87.33 | 7336.73 | 2.09 | 0.589 | None |
| 21 | 204992_s_at | 2196.70 | 3489.70 | 3119.97 | −1.59 | 0.047 | Up |
| 22 | 205041_s_at | 47.77 | 58.01 | 1752.03 | −1.21 | 0.727 | None |
| 23 | 205108_s_at | 142.97 | 62.90 | 834.18 | 2.27 | 0.106 | None |
| 24 | 205229_s_at | 364.97 | 926.46 | 856.14 | −2.54 | 0.253 | None |
| 25 | 205240_at | 279.40 | 1207.46 | 1139.79 | −4.32 | 0.005 | Up |
| 26 | 205477_s_at | 46.23 | 34.97 | 701.76 | 1.32 | 0.772 | None |
| 27 | 205522_at | 640.93 | 368.34 | 295.40 | 1.74 | 0.075 | None |
| 28 | 205604_at | 154.23 | 231.71 | 226.38 | −1.50 | 0.068 | None |
| 29 | 205650_s_at | 178.17 | 140.14 | 1761.42 | 1.27 | 0.432 | None |
| 30 | 205754_at | 22.73 | 55.83 | 415.07 | −2.46 | 0.152 | None |
| 31 | 205755_at | 29.30 | 38.10 | 422.89 | −1.30 | 0.552 | None |
| 32 | 205923_at | 657.37 | 315.72 | 455.40 | 2.08 | 0.072 | None |
| 33 | 205969_at | 25.07 | 125.41 | 511.29 | −5.00 | 0.030 | Up |
| 34 | 206042_x_at | 311.03 | 264.57 | 396.37 | 1.18 | 0.517 | None |
| 35 | 206130_s_at | 43.47 | 57.18 | 271.50 | −1.32 | 0.319 | None |
| 36 | 206287_s_at | 26.57 | 16.36 | 192.48 | 1.33 | 0.065 | None |
| 37 | 206350_at | 195.43 | 163.91 | 1249.63 | 1.19 | 0.395 | None |
| 38 | 207267_s_at | 45.70 | 232.96 | 278.08 | −5.10 | 0.000 | Up |
| 39 | 207761_s_at | 15860.73 | 4047.53 | 3121.27 | 3.92 | 0.080 | None |
| 40 | 208470_s_at | 222.47 | 71.82 | 7626.67 | 3.10 | 0.416 | None |
| 41 | 208510_s_at | 2608.67 | 1188.71 | 1540.47 | 2.19 | 0.040 | Down |
| 42 | 208962_s_at | 483.53 | 1396.28 | 837.45 | −2.89 | 0.050 | Up |
| 43 | 209555_s_at | 1135.73 | 193.56 | 220.56 | 5.87 | 0.098 | None |
| 44 | 209699_x_at | 3171.57 | 1635.38 | 2308.79 | 1.94 | 0.348 | None |
| 45 | 209901_x_at | 552.10 | 181.39 | 155.06 | 3.04 | 0.012 | Down |
| 46 | 210619_s_at | 60.00 | 86.60 | 120.30 | −1.44 | 0.438 | None |
| 47 | 211367_s_at | 926.10 | 432.47 | 243.66 | 2.14 | 0.050 | Down |
| 48 | 211429_s_at | 2295.53 | 2216.16 | 9488.42 | 1.04 | 0.902 | None |
| 49 | 211991_s_at | 6946.27 | 972.13 | 676.73 | 7.15 | 0.021 | Down |
| 50 | 212224_at | 1218.77 | 450.14 | 622.11 | 2.71 | 0.010 | Down |
| 51 | 212235_at | 84.63 | 350.34 | 354.51 | −4.14 | 0.000 | Up |
| 52 | 212850_s_at | 890.13 | 1750.36 | 2601.93 | −1.97 | 0.162 | None |
| 53 | 213204_at | 196.90 | 255.64 | 446.46 | −1.30 | 0.623 | None |
| 54 | 213343_s_at | 15.47 | 125.19 | 173.24 | −6.26 | 0.005 | Up |
| 55 | 213568_at | 360.83 | 321.92 | 254.19 | 1.12 | 0.730 | None |
| 56 | 213592_at | 769.43 | 865.09 | 699.26 | −1.12 | 0.689 | None |
| 57 | 213988_s_at | 4964.47 | 3437.08 | 2846.43 | 1.44 | 0.340 | None |
| 58 | 214063_s_at | 142.40 | 61.62 | 987.28 | 2.31 | 0.338 | None |
| 59 | 214428_x_at | 906.10 | 552.37 | 1554.22 | 1.64 | 0.172 | None |
| 60 | 214456_x_at | 276.03 | 589.09 | 3362.99 | −2.13 | 0.185 | None |
| 61 | 214465_at | 28.50 | 29.79 | 497.97 | −1.05 | 0.891 | None |
| 62 | 214604_at | 216.97 | 314.54 | 453.00 | −1.45 | 0.144 | None |
| 63 | 214608_s_at | 42.57 | 259.89 | 148.71 | −6.11 | 0.272 | None |
| 64 | 214669_x_at | 15563.97 | 1369.14 | 413.48 | 11.37 | 0.062 | None |
| 65 | 215388_s_at | 996.20 | 448.00 | 901.10 | 2.22 | 0.163 | None |
| 66 | 217767_at | 1413.73 | 785.02 | 3880.91 | 1.80 | 0.006 | Down |
| 67 | 218232_at | 933.40 | 349.86 | 219.99 | 2.67 | 0.065 | None |
| 68 | 219508_at | 15840.80 | 3753.78 | 6111.93 | 4.22 | 0.000 | Down |
| 69 | 219612_s_at | 158.60 | 56.27 | 4577.00 | 2.82 | 0.273 | None |
| 70 | 222162_s_at | 2005.40 | 494.23 | 357.27 | 4.06 | 0.015 | Down |
| 71 | 37020_at | 8.43 | 8.97 | 1678.06 | −0.45 | 0.674 | None |
| 72 | 39763_at | 155.00 | 113.86 | 626.34 | 1.36 | 0.139 | None |

| | | Spalte | | | |
|---|---|---|---|---|---|
| \textcircled{1} | | 10 | | | |
| Spalte 1 | | T- | Spalte 11 | | |
| SEQ | Spalte 9 | Test | Direction | | |
| ID | Fc_Lm | Lm | Lm vs | Spalte 12 | Spalte 13 |
| NO:. | vs Tu | vs Tu | Tu | Gene name | Gene |
| 1 | −1.07 | 0.821 | None | ATPase, H+ transporting, | ATP6V0C |
| | | | | lysosomal 16 kDa, V0 | |
| | | | | subunit c | |
| 2 | 1.21 | 0.362 | None | major histocompatibility | HLA-DPB1 |
| | | | | complex, class II, DP beta 1 | |
| 3 | 1.29 | 0.114 | None | EGF-containing fibulin- | EFEMP1 |
| | | | | like extracellular matrix | |
| | | | | protein 1 | |
| 4 | 1.32 | 0.339 | None | complement component 1, | C1QB |
| | | | | q subcomponent, beta | |
| | | | | polypeptide | |
| 5 | −1.25 | 0.502 | None | phosphorylase, glycogen; | PYGL |
| | | | | liver (Hers disease) | |
| 6 | −1.16 | 0.774 | None | apolipoprotein E | APOE |
| 7 | 1.02 | 0.557 | None | CD163 antigen | CD163 |
| 8 | 1.21 | 0.691 | None | phospholipase C, beta 4 | PLCB4 |
| 9 | 1.30 | 0.411 | None | 5′-nucleotidase, ecto | NT5E |
| | | | | (CD73) | |
| 10 | −1.59 | 0.229 | None | chromosome 11 open | C11orf9 |
| | | | | reading frame 9 | |
| 11 | −1.53 | 0.206 | None | rTS beta protein | HSRTSBETA |
| 12 | 1.34 | 0.192 | None | solute carrier family 31 | SLC31A2 |
| | | | | (copper transporters), | |
| | | | | member 2 | |
| 13 | −2.12 | 0.076 | None | apolipoprotein C-I | APOCI |
| 14 | −1.03 | 0.925 | None | sialyltransferase | STHM |
| 15 | −1.54 | 0.252 | None | L1 cell adhesion molecule | LICAM |
| | | | | (hydrocephalus, stenosis | |
| | | | | of aqueduct of Sylvius 1) | |
| 16 | −1.28 | 0.702 | None | interferon stimulated gene | ISG20 |
| | | | | 20 kDa | |
| 17 | −3.28 | 0.047 | Up | aldolase B, fructose- | ALDOB |
| | | | | bisphosphate | |
| 18 | −2.46 | 0.171 | None | coagulation factor V | F5 |
| | | | | (proaccelerin, labile | |
| | | | | factor) | |
| 19 | −14.61 | 0.016 | Up | group-specific component | GC |
| | | | | (vitamin D binding | |
| | | | | protein) | |
| 20 | −84.01 | 0.002 | Up | fibrinogen, B beta | FGB |
| | | | | polypeptide | |
| 21 | 1.12 | 0.728 | None | profilin 2 | PFN2 |
| 22 | −30.20 | 0.041 | Up | orosomucoid 1 | ORM1 |
| 23 | −13.26 | 0.106 | None | apolipoprotein B | APOB |
| | | | | (including Ag(x) antigen) | |
| 24 | 1.08 | 0.928 | None | coagulation factor C | COCH |
| | | | | homolog, cochlin | |
| | | | | (Limulus polyphemus) | |
| 25 | 1.06 | 0.906 | None | LGN protein | LGN |
| 26 | −20.07 | 0.012 | Up | alpha-1. | AMBP |
| | | | | microglobulin/bikunin | |
| | | | | precursor | |
| 27 | 1.25 | 0.477 | None | homeo box D4 | HOXD4 |
| 28 | 1.02 | 1.000 | None | homeo box D9 | HOXD9 |
| 29 | −12.57 | 0.023 | Up | fibrinogen, A alpha | FGA |
| | | | | polypeptide | |
| 30 | −7.43 | 0.003 | Up | coagulation factor II | F2 |
| | | | | (thrombin) | |
| 31 | −11.10 | 0.020 | Up | pre-alpha (globulin) | 1TIH3 |
| | | | | inhibitor, H3 polypeptide | |
| 32 | −1.44 | 0.364 | None | reelin | RELN |
| 33 | −4.08 | 0.003 | Up | arylacetamide deacetylase | AADAC |
| | | | | (esterase) | |
| 34 | −1.50 | 0.193 | None | small nuclear | SNRPN |
| | | | | ribonucleoprotein | |
| | | | | polypeptide N | |
| 35 | −4.75 | 0.005 | Up | asialoglycoprotein | ASGR2 |
| | | | | receptor 2 | |
| 36 | −9.62 | 0.050 | None | inter-alpha (globulin) | ITIH4 |
| | | | | inhibitor H4 (plasma | |
| | | | | Kallikrein-sensitive | |
| | | | | glycoprotein) | |
| 37 | −7.62 | 0.009 | Up | amylopid P component, | APCS |
| | | | | serum | |
| 38 | −1.19 | 0.366 | None | Down syndrome critical | DSCR6 |
| | | | | region gene 6 | |
| 39 | 1.30 | 0.391 | None | DKFZP586A0522 protein | DKFZP586A0$$ |
| 40 | −106.19 | 0.004 | Up | haptoglobin | HP |
| 41 | −1.30 | 0.311 | None | peroxisome proliferative | PPARG |
| | | | | activated receptor, gamma | |
| 42 | 1.67 | 0.231 | None | fatty acid desaturase 1 | FADS1 |
| 43 | −1.14 | 0.886 | None | CD36 antigen (collagen | CD36 |
| | | | | type I receptor, | |
| | | | | thrombospondin receptor) | |
| 44 | −1.41 | 0.531 | None | aldo-keto reductase family | AKR1C2 |
| | | | | 1, member C2 | |
| | | | | (dihydrodiol | |
| | | | | dehydrogenase 2) | |
| 45 | 1.17 | 0.593 | None | allograft inflammatory | AIF1 |
| | | | | factor 1 | |
| 46 | −1.39 | 0.459 | None | hyaluronoglucosaminidse 1 | HYAL1 |
| 47 | 1.77 | 0.271 | None | caspase 1, apoptosis- | CASP1 |
| | | | | related cysteine protease | |
| | | | | (ICE-1) | |
| 48 | −4.28 | 0.008 | Up | alpha-1 Antitrypsin | SERPINA1 |
| 49 | 1.44 | 0.182 | None | major histocompatibility | HLA-DPA1 |
| | | | | complex, class II, DP | |
| | | | | alpha 1 | |
| 50 | −1.38 | 0.424 | None | aldehyde dehydrogenase 1 | ALDH1A1 |
| | | | | family, member A1 | |
| 51 | −1.01 | 0.905 | None | plexin D1 | PLXND1 |
| 52 | −1.49 | 0.325 | None | low density lipoprotein | LRP4 |
| | | | | receptor-related protein 4 | |
| 53 | −1.75 | 0.232 | None | p53-associated parkin-like | PARC |
| | | | | cytoplasmic protein | |
| 54 | −1.38 | 0.292 | None | hypothetical protein | PP1665 |
| | | | | PP1665 | |
| 55 | 1.27 | 0.519 | None | odd-skipped-related 2A | OSR2 |
| | | | | protein | |
| 56 | 1.24 | 0.308 | None | angiotensin II receptor- | AGTRL1 |
| | | | | like 1 | |
| 57 | 1.21 | 0.407 | None | spermidine/spermine N1- | SAT |
| | | | | acetyltransferase | |
| 58 | −16.02 | 0.028 | Up | transferrin | TF |
| 59 | −2.81 | 0.021 | Up | complement component | C4A |
| | | | | 4A | |
| 60 | −5.71 | 0.100 | None | serum amyloid A2 | SAA2 |
| 61 | −16.72 | 0.052 | None | orosomucoid 2 | ORM2 |
| 62 | −1.44 | 0.307 | None | homeo box D11 | HOXD11 |
| 63 | 1.75 | 0.617 | None | eyes absent homolog 1 | EYA1 |
| | | | | (Drosophila) | |
| 64 | 3.31 | 0.014 | Down | similar to Human Ig | na |
| | | | | rearranged gamma chain | |
| | | | | mRNA, V-J-C region | |
| 65 | −2.01 | 0.149 | None | H factor (complement)- | HFL1 |
| | | | | like 1 | |
| 66 | −4.94 | 0.029 | Up | complement component 3 | C3 |
| 67 | 1.59 | 0.236 | None | complement component 1, | C1QA |
| | | | | q subcomponent, alpha | |
| | | | | polypeptide | |
| 68 | −1.63 | 0.261 | None | glucosaminyl (N-acetyl) | GCNT3 |
| | | | | transferase 3, mucin type | |
| 69 | −81.34 | 0.004 | Up | fibrinogen, gamma | FGG |
| | | | | polypeptide | |
| 70 | 1.38 | 0.208 | None | a disintegrin-like and | ADAMTS1 |
| | | | | metalloprotease with | |
| | | | | thrombospondin type 1 | |
| 71 | −83.90 | 0.026 | Up | C-reactive protein, | CRP |
| | | | | pentraxin-related | |
| 72 | −5.50 | 0.024 | Up | hemopexin | HPX |

Key: \textcircled{1} Column
Description for Table 2
Table 2 lists all 72 genes which, after the evaluation of the raw data according to the statistical procedure from Example 4a, are relevant for a comparison of the gene expression between normal tissue (normal colon mucosa (Muc)), colorectal primary tumor (Tu) and liver metastasis (Lm) of these colorectal carcinomas.
Column 1 contains the SEQ ID NOS of the gene
Column 2 contains the Affymetrix Accession Numbers on the HG U-133-A Microarray
Column 3 contains the mean values of the gene expression of (n = 3) normal mucosa
Column 4 contains the mean values of the gene expression of (n = 10) colorectal primary tumors
Column 5 contains the mean values of the gene expression of (n = 20) liver metastases (corresponding with colorectal carcinomas)
Column 6 contains the differences in gene expression between tumor and normal tissue indicated as fold-change (Fc)
Column 7 shows the significance level in the t-test
Column 8 shows whether the individual tissues have been upregulated (up) or downregulated (down) or are not significantly different (none) (in comparison to the normal tissue)
Column 9 contains the different in gene expression between liver metastasis and tumor indicated as fold-change (Fc)
Column 10 shows the significance level in the t-test
Column 11 shows whether the individual genes in the liver metastasis have been upregulated (up) or downregulated (down) or are not significantly different (none) (in comparison to the tumor)
Column 12 contains the names of the genes
Column 13 contains the gene symbol

TABLE 3
Expression data colon mucosa (Muc) versus colorectal primary tumor (Tu) versus liver
metastasis (Lm) after statistical evaluation according to Example 4b

| \textcircled{1} | | | | | | Spalte 7 | |
|---|---|---|---|---|---|---|---|
| Spalte 1 | | | | | Spalte 6 | T- | Spalte 8 |
| SEQ | | Spalte 3 | Spalte 4 | Spalte 5 | Fc_Tu | Test | Direction |
| ID | Spalte 2 | Avg | Avg | Avg | vs | Tu vs | Tu vs |
| NO: | Affy Nr. | Mucosa | Tumor | Metastase | Muc | Muc | Muc |
| 73 | 201564_s_at | 106.20 | 299.57 | 173.81 | −2.82 | 0.054 | None |
| 74 | 201645_at | 503.17 | 1016.04 | 463.12 | −2.02 | 0.014 | Up |
| 75 | 202973_x_at | 4621.03 | 3570.39 | 4282.19 | 1.29 | 0.521 | None |
| 76 | 203180_at | 729.80 | 1381.29 | 758.24 | −1.89 | 0.071 | None |
| 77 | 203649_s_at | 686.60 | 400.81 | 231.62 | 1.71 | 0.075 | None |
| 78 | 203708_at | 1319.57 | 750.28 | 492.61 | 1.76 | 0.043 | Down |
| 79 | 203771_s_at | 304.17 | 100.96 | 119.50 | 3.01 | 0.021 | Down |
| 80 | 203819_s_at | 63.50 | 183.51 | 790.74 | −2.89 | 0.167 | None |
| 81 | 203837_at | 1250.93 | 2099.21 | 1639.14 | −1.68 | 0.092 | None |
| 10 | 204073_s_at | 449.53 | 441.00 | 703.39 | 1.02 | 0.950 | None |
| 14 | 204542_at | 258.77 | 218.93 | 224.52 | 1.18 | 0.742 | None |
| 82 | 204673_at | 8751.97 | 1551.27 | 1509.46 | 5.64 | 0.000 | Down |
| 83 | 205097_at | 20565.07 | 1669.43 | 845.78 | 12.32 | 0.012 | Down |
| 25 | 205240_at | 279.40 | 1207.46 | 1139.79 | −4.32 | 0.005 | Up |
| 84 | 205278_at | 42.83 | 160.86 | 240.36 | −3.76 | 0.218 | None |
| 85 | 205372_at | 134.47 | 349.76 | 490.25 | −2.60 | 0.008 | Up |
| 86 | 205414_s_at | 1216.53 | 307.57 | 456.31 | 3.96 | 0.000 | Down |
| 87 | 205767_at | 228.30 | 925.02 | 995.84 | −4.05 | 0.151 | None |
| 88 | 205865_at | 141.40 | 222.88 | 223.25 | −1.58 | 0.080 | None |
| 89 | 205927_s_at | 2517.43 | 3476.27 | 2453.84 | −1.38 | 0.750 | None |
| 90 | 205937_at | 68.63 | 170.00 | 214.15 | −2.48 | 0.065 | None |
| 91 | 206884_s_at | 32.90 | 143.10 | 183.25 | −4.35 | 0.301 | None |
| 92 | 207011_s_at | 109.60 | 277.71 | 167.70 | −2.53 | 0.035 | Up |
| 93 | 207039_at | 134.83 | 339.42 | 549.34 | −2.52 | 0.073 | None |
| 94 | 207063_at | 90.93 | 166.79 | 172.44 | −1.83 | 0.486 | None |
| 95 | 207509_s_at | 126.00 | 256.13 | 165.25 | −2.03 | 0.148 | None |
| 96 | 208262_x_at | 113.20 | 76.39 | 63.70 | 1.48 | 0.498 | None |
| 41 | 208510_s_at | 2608.67 | 1188.71 | 1540.47 | 2.19 | 0.040 | Down |
| 97 | 209125_at | 108.57 | 242.70 | 1902.08 | −2.24 | 0.168 | None |
| 98 | 209436_at | 5056.93 | 2371.10 | 1757.15 | 2.13 | 0.071 | None |
| 99 | 209905_at | 1536.53 | 4320.54 | 4507.15 | −2.81 | 0.014 | Up |
| 100 | 210164_at | 209.77 | 985.48 | 1052.44 | −4.70 | 0.096 | None |
| 101 | 211372_s_at | 2553.83 | 321.82 | 278.83 | 7.94 | 0.013 | Down |
| 102 | 211430_s_at | 5355.93 | 3219.96 | 1384.60 | 1.66 | 0.335 | None |
| 103 | 212349_at | 279.23 | 789.60 | 840.55 | −2.83 | 0.020 | Up |
| 104 | 212531_at | 741.50 | 10783.23 | 5421.20 | −14.54 | 0.008 | Up |
| 52 | 212850_s_at | 890.13 | 1750.36 | 2601.93 | −1.97 | 0.162 | None |
| 105 | 213230_at | 72.20 | 362.67 | 368.39 | −5.02 | 0.008 | Up |
| 106 | 213435_at | 5470.87 | 4275.04 | 3364.76 | 1.28 | 0.226 | None |
| 107 | 213880_at | 186.80 | 3407.68 | 1647.43 | −18.24 | 0.062 | None |
| 108 | 213994_s_at | 1297.73 | 871.50 | 570.75 | 1.49 | 0.409 | None |
| 63 | 214608_s_at | 42.57 | 259.89 | 148.71 | −6.11 | 0.272 | None |
| 109 | 214677_x_at | 41827.57 | 5890.19 | 1491.95 | 7.10 | 0.009 | Down |
| 110 | 216910_at | 133.67 | 55.04 | 70.65 | 2.43 | 0.149 | None |
| 111 | 217047_s_at | 2877.57 | 2235.86 | 2657.61 | 1.29 | 0.606 | None |
| 112 | 217988_at | 1552.83 | 2601.08 | 3201.26 | −1.68 | 0.025 | Up |
| 113 | 218445_at | 275.27 | 539.87 | 475.70 | −1.96 | 0.157 | None |
| 68 | 219508_at | 15840.80 | 3753.78 | 6111.93 | 4.22 | 0.000 | Down |
| 114 | 219697_at | 452.87 | 223.17 | 244.57 | 2.03 | 0.010 | Down |
| 115 | 219735_s_at | 1806.57 | 1183.51 | 943.86 | 1.53 | 0.029 | Down |
| 116 | 219764_at | 119.33 | 672.81 | 464.35 | −5.64 | 0.135 | None |
| 117 | 220482_s_at | 165.07 | 131.71 | 196.26 | 1.25 | 0.611 | None |
| 118 | 220658_s_at | 70.40 | 222.04 | 291.74 | −3.15 | 0.003 | Up |
| 119 | 222347_at | 172.97 | 115.60 | 221.98 | 1.50 | 0.451 | None |
| 120 | 34210_at | 1209.80 | 470.02 | 536.68 | 2.57 | 0.062 | None |

| | | Spalte | | | | |
|---|---|---|---|---|---|---|
| \textcircled{1} | | 10 | | | | |
| Spalte 1 | | T- | Spalte 11 | | | |
| SEQ | Spalte 9 | Test | Direction | | | |
| ID | Fc_Lm | Lm | Lm vs | Spalte 12 | Spalte13 | |
| NO: | vs Tu | vs Tu | Tu | Gene Name | Gene | Spalte 14 |
| 73 | 1.72 | 0.214 | None | fascin homolog 1, | FSCN1 | |
| | | | | actin-bundling | | |
| | | | | protein | | |
| | | | | (Strongylocentrotus | | |
| | | | | purpuratus) | | |
| 74 | 2.19 | 0.005 | Down | tenascin C | TNC | |
| | | | | (hexabrachion) | | |
| 75 | −1.20 | 0.512 | None | family with | FAM13A1 | |
| | | | | sequence similarity | | |
| | | | | 13, member A1 | | |
| 76 | 1.82 | 0.054 | None | aldehyde | ALDH1A3 | |
| | | | | dehydrogenase 1 | | |
| | | | | family, member A3 | | |
| 77 | 1.73 | 0.282 | None | phospholipase A2, | PLA2G2A | |
| | | | | group IIA | | |
| | | | | (platelets, synovial | | |
| | | | | fluid) | | |
| 78 | 1.52 | 0.313 | None | phosphodiesterase | PDE4B | |
| | | | | 4B, cAMP-specific | | |
| | | | | (phosphodiesterase | | |
| | | | | E4 dunce homolog, | | |
| | | | | Drosophila) | | |
| 79 | −1.18 | 0.996 | None | biliverdin reductase A | BLVRA | |
| 80 | −4.31 | 0.066 | None | IGF-II mRNA- | IMP-3 | |
| | | | | binding protein 3 | | |
| 81 | 1.28 | 0.345 | None | mitogen-activated | MAP3K5 | |
| | | | | protein kinase | | |
| | | | | kinase kinase 5 | | |
| 10 | −1.59 | 0.229 | None | chromosome 11 | C11orf9 | x |
| | | | | open reading frame 9 | | |
| 14 | −1.03 | 0.925 | None | sialyltransferase | STHM | x |
| 82 | 1.03 | 0.927 | None | mucin 2, | MUC2 | |
| | | | | intestinal/tracheal | | |
| | | | | /// mucin 2, | | |
| | | | | intestinal/tracheal | | |
| 83 | 1.97 | 0.420 | None | solute carrier | SLC26A2 | |
| | | | | family 26 (sulfate | | |
| | | | | transporter), | | |
| | | | | member 2 | | |
| 25 | 1.06 | 0.906 | None | LGN protein | LGN | x |
| 84 | −1.49 | 0.630 | None | glutamate | GAD1 | |
| | | | | decarboxylase 1 | | |
| | | | | (brain, 67 kDa) | | |
| 85 | −1.40 | 0.228 | None | pleiomorphic | PLAG1 | |
| | | | | adenoma gene 1 | | |
| 86 | −1.48 | 0.207 | None | KIAA0672 gene | KIAA0672 | |
| | | | | product | | |
| 87 | −1.08 | 0.861 | None | epiregulin | EREG | |
| 88 | −1.00 | 0.856 | None | dead ringer-like 1 | DRIL1 | |
| | | | | (Drosophila) | | |
| 89 | 1.42 | 0.710 | None | cathepsin E | CTSE | |
| 90 | −1.26 | 0.435 | None | cell growth | CGREF1 | |
| | | | | regulator with EF | | |
| | | | | hand domain 1 | | |
| 91 | −1.28 | 0.722 | None | sciellin | SCEL | |
| 92 | 1.66 | 0.003 | Down | PTK7 protein | PTK7 | |
| | | | | tyrosine kinase 7 | | |
| 93 | −1.62 | 0.253 | None | cyclin-dependent | CDKN2A | |
| | | | | kinase inhibitor 2A | | |
| | | | | (melanoma, p16, | | |
| | | | | inhibits CDK4) | | |
| 94 | −1.03 | 0.897 | None | chromosome Y | CYorf14 | |
| | | | | open reading frame | | |
| | | | | 14 | | |
| 95 | 1.55 | 0.273 | None | leukocyte- | LAIR2 | |
| | | | | associated Ig-like | | |
| | | | | receptor 2 | | |
| 96 | 1.20 | 0.662 | None | Mediterranean | MEFV | |
| | | | | fever | | |
| 41 | −1.30 | 0.311 | None | peroxisome | PPARG | x |
| | | | | proliferative | | |
| | | | | activated receptor, | | |
| | | | | gamma | | |
| 97 | −7.84 | 0.313 | None | keratin 6A | KRT6A | |
| 98 | 1.35 | 0.536 | None | spondin 1, (f- | SPON1 | |
| | | | | spondin) | | |
| | | | | extracellular matrix | | |
| | | | | protein | | |
| 99 | −1.04 | 0.718 | None | homeo box A9 | HOXA9 | |
| 100 | −1.07 | 0.863 | None | granzyme B | GZMB | |
| | | | | (granzyme 2, | | |
| | | | | cytotoxic T- | | |
| | | | | lymphocyte- | | |
| | | | | associated serine | | |
| | | | | esterase 1) | | |
| 101 | 1.15 | 0.649 | None | interleukin 1 | IL1R2 | |
| | | | | receptor, type II | | |
| 102 | 2.33 | 0.099 | None | immunoglobulin | IGHG3 | |
| | | | | heavy constant | | |
| | | | | gamma 3 (G3m | | |
| | | | | marker) | | |
| 103 | −1.06 | 0.685 | None | protein O- | POFUT1 | |
| | | | | fucosyltransferase 1 | | |
| 104 | 1.99 | 0.111 | None | lipocalin 2 | LCN2 | |
| | | | | (oncogene 24p3) | | |
| 52 | −1.49 | 0.325 | None | low density | LRP4 | x |
| | | | | lipoprotein | | |
| | | | | receptor-related | | |
| | | | | protein 4 | | |
| 105 | −1.02 | 0.885 | None | parancoplastic | HUMPPA | |
| | | | | antigen | | |
| 106 | 1.27 | 0.432 | None | SATB family | SATB2 | |
| | | | | member 2 | | |
| 107 | 2.07 | 0.305 | None | G protein-coupled | GPR49 | |
| | | | | receptor 49 | | |
| 108 | 1.53 | 0.508 | None | spondin 1, (f- | SPON1 | |
| | | | | spondin) | | |
| | | | | extracellular matrix | | |
| | | | | protein | | |
| 63 | 1.75 | 0.617 | None | eyes absent | EYA1 | x |
| | | | | homolog 1 | | |
| | | | | (Drosophila) | | |
| 109 | 3.95 | 0.038 | Down | immunoglobulin | IGLJ3 | |
| | | | | lambda joining 3 | | |
| 110 | −1.28 | 0.408 | None | — | — | |
| 111 | −1.19 | 0.543 | None | family with | FAM13A1 | |
| | | | | sequence similarity | | |
| | | | | 13, member A1 | | |
| 112 | −1.23 | 0.106 | None | chromosome 14 | C14orf18 | |
| | | | | open reading frame | | |
| | | | | 18 | | |
| 113 | 1.13 | 0.818 | None | H2A histone | H2AFY2 | |
| | | | | family, member Y2 | | |
| 68 | −1.63 | 0.261 | None | glucosaminyl (N- | GCNT3 | x |
| | | | | acetyl) transferase | | |
| | | | | 3, mucin type | | |
| 114 | −1.10 | 0.817 | None | heparan sulfate | HS3ST2 | |
| | | | | (glucosamine) 3-O- | | |
| | | | | sulfotransferase 2 | | |
| 115 | 1.25 | 0.371 | None | LBP protein; likely | LBP-9 | |
| | | | | ortholog of mouse | | |
| | | | | CRTR-1 | | |
| 116 | 1.45 | 0.650 | None | frizzled homolog | FZD10 | |
| | | | | 10 (Drosophila) | | |
| 117 | −1.49 | 0.063 | None | deafness locus | DELGEF | |
| | | | | associated putative | | |
| | | | | guanine nucleotide | | |
| | | | | exchange factor | | |
| 118 | −1.31 | 0.325 | None | aryl hydrocarbon | ARNTL2 | |
| | | | | receptor nuclear | | |
| | | | | translocator-like 2 | | |
| 119 | −1.92 | 0.182 | None | Homo sapiens | — | |
| | | | | transcribed | | |
| | | | | sequence with | | |
| | | | | weak similarity to | | |
| | | | | protein | | |
| | | | | ref: NP_009056.1 | | |
| | | | | (H. sapiens) | | |
| | | | | ubiquitously | | |
| | | | | transcribed | | |
| | | | | tetratricopeptide | | |
| | | | | repeat gene, Y | | |
| | | | | chromosome; | | |
| | | | | Ubiquitously | | |
| | | | | transcribed TPR | | |
| | | | | gene on Y | | |
| | | | | chromosome | | |
| | | | | [Homo sapiens] | | |
| 120 | −1.14 | 0.959 | None | CDW52 antigen | CDW52 | |
| | | | | (CAMPATH-1 | | |
| | | | | antigen) | | |

Key: \textcircled{1} Column
Description for Table 3
Table 3 lists all 55 genes which, after the evaluation of the raw data according to the statistical procedure from Example 4b, are relevant for a comparison of the gene expression between normal tissue (normal colon mucosa (Muc)), colorectal primary tumor (Tu) and liver metastasis (Lm) of these colorectal carcinomas.
Column 1 contains the SEQ ID NOS of the genes
Column 2 contains the Affymetrix Accession Numbers from the HG U-133-A Microarray
Column 3 contains the mean values of the gene expression of (n = 3) normal mucosa
Column 4 contains the mean values of the gene expression of (n = 10) colorectal primary tumors
Column 5 contains the mean values of the gene expression of (n = 20) liver metastases (corresponding with colorectal carcinoma)
Column 6 contains the difference in the gene expression between tumor and normal tissue indicated as fold-change (Fc)
Column 7 shows the significance level in the t-test
Column 8 shows whether the individual genes in the tumor are upregulated (up) or downregulated (down) or not significantly different (none) (in comparison to the normal tissue)
Column 9 contains the difference in the gene expression between liver metastases and tumor indicated as fold-change (Fc)
Column 10 shows the significance level in the t-test
Column 11 shows whether the individual genes of the liver metastasis have been upregulated (up) or downregulated (down) or are not significantly different (none) (in comparison to the tumor)
Column 12 contains the names of the genes
Column 13 contains the gene symbol
Column 14 marks the gene which was chosen both in Table 2 and in Table 3 with a “x”

TABLE 4
Expression data after statistical evaluation according to Example 4b of the responder (Resp)
versus non-responder (Non-Resp) to a 5-FU containing palliative chemotherapy

| \textcircled{1} | | | | | | | | |
|---|---|---|---|---|---|---|---|---|
| Spalte 1 | | | | Spalte 5 | | Spalte 7 | | |
| SEQ | | Spalte 3 | Spalte 4 | Fc_Resp | Spalte 6 | Direction | | |
| ID | Spalte 2 | Avg | Avg Non- | vs Non- | T- | Non-Resp | Spalte 8 | Spalte 9 |
| NO: | Affy Nr. | Responder | Responder | Resp | Test | vs Resp | Gene Name | Gene |
| 73 | 201564_s_at | 78.93 | 225.8 | −2.86 | 0.001 | Up | fascin homolog 1, actin-bundling protein | FSCN1 |
| | | | | | | | (Strongylocentrotus purpuratus) | |
| 74 | 201645_at | 309.55 | 737.18 | −2.38 | 0.011 | Up | tenascin C (hexabrachion) | TNC |
| 75 | 202973_x_at | 4587.02 | 2078.33 | 2.21 | 0.002 | Down | family with sequence similarity 13, member A1 | FAM13A1 |
| 76 | 203180_at | 385.6 | 1322 | −3.43 | 0.001 | Up | aldehyde dehydrogenase 1 family, member A3 | ALDH1A3 |
| 77 | 203649_s_at | 110.13 | 329.98 | −3 | 0.031 | Up | phospholipase A2, group IIA (platelets, synovial | PLA2G2A |
| | | | | | | | fluid) | |
| 78 | 203708_at | 154.7 | 944.08 | −6.1 | 0.003 | Up | phosphodiesterase 4B, cAMP-specific | PDE4B |
| | | | | | | | (phosphodiesterase E4 dunce homolog, | |
| | | | | | | | Drosophila) | |
| 79 | 203771_s_at | 73 | 152.42 | −2.09 | 0.002 | Up | biliverdin reductase A | BLVRA |
| 80 | 203819_s_at | 412.65 | 582.32 | −1.41 | 0.076 | Up | IGF-II mRNA-binding protein 3 | IMP-3 |
| 81 | 203837_at | 678.42 | 1604.02 | −2.36 | 0.016 | Up | mitogen-activated protein kinase kinase kinase 5 | MAP3K5 |
| 10 | 204073_s_at | 359.77 | 1108.27 | −3.08 | 0.029 | Up | chromosome 11 open reading frame 9 | C11orf9 |
| 14 | 204542_at | 119.03 | 432.17 | −3.63 | 0.014 | Up | sialyltransferase | STHM |
| 82 | 204673_at | 176.35 | 3241.4 | −18.38 | 0.123 | Up | mucin 2, intestinal/tracheal /// mucin 2, | MUC2 |
| | | | | | | | intestinal/tracheal | |
| 83 | 205097_at | 1437.68 | 165.6 | 8.68 | 0.011 | Down | solute carrier family 26 (sulfate transporter), | SLC26A2 |
| | | | | | | | member 2 | |
| 25 | 205240_at | 1539.52 | 435.67 | 3.53 | 0.005 | Down | LGN protein | LGN |
| 84 | 205278_at | 72.75 | 465.48 | −6.4 | 0.015 | Up | glutamate decarboxylase 1 (brain, 67 kDa) | GAD1 |
| 85 | 205372_at | 577.25 | 225.62 | 2.56 | 0.007 | Down | pleiomorphic adenoma gene 1 | PLAG1 |
| 86 | 205414_s_at | 909.3 | 198.15 | 4.59 | 0.004 | Down | KIAA0672 gene product | KIAA0672 |
| 87 | 205767_at | 950.72 | 440.02 | 2.16 | 0.024 | Down | epiregulin | EREG |
| 88 | 205865_at | 343.2 | 125.48 | 2.74 | 0.009 | Down | dead ringer-like 1 (Drosophila) | DRIL1 |
| 89 | 205927_s_at | 424.82 | 6797.2 | −16 | 0.037 | Up | cathepsin E | CTSE |
| 90 | 205937_at | 247.75 | 120.5 | 2.06 | 0.008 | Down | cell growth regulator with EF hand domain 1 | OGREF1 |
| 91 | 206884_s_at | 49.95 | 245.05 | −4.91 | 0.015 | Up | sciellin | SCEL |
| 92 | 207011_s_at | 290.3 | 97.75 | 2.97 | 0.001 | Down | PTK7 protein tyrosin kinase 7 | PTK7 |
| 93 | 207039_at | 199.7 | 575.47 | −2.88 | 0.017 | Up | cyclin-dependent kinase inhibitor 2A (melanoma, | CDKN2A |
| | | | | | | | p16, inhibits CDK4) | |
| 94 | 207063_at | 100.38 | 435.75 | −4.34 | 0.298 | Up | chromosome Y open reading frame 14 | CYorf14 |
| 95 | 207509_s_at | 111.95 | 267.15 | −2.39 | 0.008 | Up | leukocyte-associated Ig-like receptor 2 | LAIR2 |
| 96 | 208262_x_at | 88.7 | 25.38 | 3.49 | 0.046 | Down | Mediterranean fever | MEFV |
| 41 | 208510_s_at | 3005.18 | 776.35 | 3.87 | 0.023 | Down | peroxisome proliferative activated receptor, | PPARG |
| | | | | | | | gamma | |
| 97 | 209125_at | 85.85 | 389.77 | −4.54 | 0.028 | Up | keratin 6A | KRT6A |
| 98 | 209436_at | 430.63 | 2883 | −6.69 | 0.003 | Up | spondin 1, (f-spondin) extracellular matrix | SPON1 |
| | | | | | | | protein | |
| 99 | 209905_at | 7293.25 | 2925.58 | 2.49 | 0.040 | Down | homeo box A9 | HOXA9 |
| 100 | 210164_at | 1260.1 | 1018.28 | 1.24 | 0.004 | Down | granzyme B (granzyme 2, cytotoxic T- | GZMB |
| | | | | | | | lymphocyte-associated serine esterase 1) | |
| 101 | 211372_s_at | 170.82 | 520.53 | −3.05 | 0.004 | Up | interleukin 1 receptor, type II | IL1R2 |
| 102 | 211430_s_at | 247.55 | 1745.92 | −7.05 | 0.027 | Up | immunoglobulin heavy constant gamma 3 (G3m | IGHG3 |
| | | | | | | | marker) | |
| 103 | 212349_at | 1049.9 | 617.35 | 1.7 | 0.001 | Down | protein O-fucosyltransferase 1 | POFUT1 |
| 104 | 212531_at | 1850.23 | 9150.78 | −4.95 | 0.053 | Up | lipocalin 2 (oncogene 24p3) | LCN2 |
| 52 | 212850_s_at | 3434.2 | 1111.52 | 3.09 | 0.043 | Down | low density lipoprotein receptor-related protein 4 | LRP4 |
| 105 | 213230_at | 224.27 | 529.05 | −2.36 | 0.001 | Up | paraneoplastic antigen | HUMPPA |
| 106 | 213435_at | 3523.13 | 2242.65 | 1.57 | 0.001 | Down | SATB family member 2 | SATB2 |
| 107 | 213880_at | 2524 | 606.27 | 4.16 | | Down | G protein-coupled receptor 49 | GPR49 |
| 108 | 213994_s_at | 73.4 | 967.63 | −13.18 | 0.001 | Up | spondin 1, (f-spondin) extracellular matrix | SPON1 |
| | | | | | | | protein | |
| 63 | 214608_s_at | 572.88 | 28.28 | 20.26 | 0.014 | Down | eyes absent homolog 1 (Drosophila) | EYA1 |
| 109 | 214677_x_at | 268.77 | 1507.35 | −5.61 | 0.144 | Up | immunoglobulin lambda joining 3 | IGLJ3 |
| 110 | 216910_at | 112.45 | 43.92 | 2.56 | 0.098 | Down | — | — |
| 111 | 217047_s_at | 3108.7 | 1366.12 | 2.28 | 0.002 | Down | family with sequence similarity 13, member A1 | FAM13A1 |
| 112 | 217988_at | 4618.63 | 2386.77 | 1.94 | 0.001 | Down | chromosome 14 open reading frame 18 | C14orf18 |
| 113 | 218445_at | 777.8 | 197.75 | 3.93 | 0.014 | Down | H2A histone family, member Y2 | H2AFY2 |
| 68 | 219508_at | 2260.57 | 9751.88 | −4.31 | 0.046 | Up | glucosaminyl (N-acetyl) transferase 3, mucin | GCNT3 |
| | | | | | | | type | |
| 114 | 219697_at | 205.07 | 350.1 | −1.71 | 0.005 | Up | heparan sulfate (glucosamine) 3-O- | HS3ST2 |
| | | | | | | | sulfotransferase 2 | |
| 115 | 219735_s_at | 1344.83 | 611.62 | 2.2 | 0.002 | Down | LBP protein; likely ortholog of mouse CRTR-1 | LBP-9 |
| 116 | 219764_at | 1375.78 | 76.05 | 18.09 | 0.073 | Down | frizzled homolog 10 (Drosophila) | FZD10 |
| 117 | 220482_s_at | 314.05 | 107.65 | 2.92 | 0.001 | Down | deafness locus associated putative guanine | DELGEF |
| | | | | | | | nucleotide exchange factor | |
| 118 | 220658_s_at | 181.05 | 302.38 | −1.67 | 0.003 | Up | aryl hydrocarbon receptor nuclear translocator- | ARNTL2 |
| | | | | | | | like 2 | |
| 119 | 222347_at | 150.07 | 378.72 | −2.52 | 0.111 | Up | Homo sapiens transcribed sequence with week | — |
| | | | | | | | similarity to protein ref: NP_000056.1 | |
| | | | | | | | (H. sapiens) ubiquitously transcribed | |
| | | | | | | | tetratricopeptide repeat gene, Y chromosome; | |
| | | | | | | | Ubiquitously transcribed TPR gene on Y | |
| | | | | | | | chromosome [Homo sapiens] | |
| 120 | 34210_at | 91.93 | 1517.25 | −16.5 | 0.004 | Up | CDW52 antigen (CAMPATH-1 antigen) | CDW52 |

Key: \textcircled{1} Column
Description for Table 4
Table 4 lists all 55 genes which, after the evaluation of the raw data according to the statistical procedure from Example 4a, are relevant for a comparison of the gene expression of responders (Resp) with that of non-responders (Non-Resp) in reference to a response to a 5-FU-containing palliative chemotherapy in metastasized colorectal carcinoma.
Column 1 contains the SEQ ID NOS of the gene
Column 2 contains the Affymetrix Accession Numbers from the HG U-133-A Microarray
Column 3 contains the mean values of the gene expression of (n = 8) responders
Column 4 contains the mean values of the gene expression of (n = 9) non-responders
Column 5 contains the difference in the gene expression between responders and non-responders, indicated as fold-change (Fc)
Column 6 shows the significance level in the t-test
Column 7 shows whether the individual genes in the non-responders have been upregulated (up) or downregulated (down) (in comparison to the responders)
Column 8 contains the names of the genes
Column 9 contains the gene symbol

TABLE 5
Expression data of responders (Resp), non-responders (nonresp) and patient T of Example 16

| | | | | | Spalte 6 | |
|---|---|---|---|---|---|---|
| | | | | | \textcircled{2} Veränderung | Spalte 7 |
| \textcircled{1} Spalte 1 | | | | | des Expressions- | \textcircled{3} |
| SEQ ID | Spalte 2 | Spalte 3 | Spalte 4 | Spalte 5 | niveaus bci | Veranderung |
| NO: | Affy Nr | Pat. T | avg_resp | avg_nonresp | Respondern | bei Pat. T. |
| 1 | 200954_at | 133.7 | 145.65 | 519.68 | ↓ | ↓ |
| 2 | 201137_s_at | 674.6 | 1293.3 | 5177.28 | ↓ | ↓ |
| 3 | 201842_s_at | 691 | 871.47 | 3299.13 | ↓ | ↓ |
| 4 | 202953_at | 154.6 | 305.67 | 1092.85 | ↓ | ↓ |
| 5 | 202990_at | 823.1 | 174.3 | 768.48 | ↓ | ↑ |
| 6 | 203382_s_at | 20 | 132.48 | 513.97 | ↓ | ↓ |
| 7 | 203645_s_at | 238.8 | 353.65 | 1385.95 | ↓ | ↓ |
| 8 | 203895_at | 9887 | 12464.9 | 2658.78 | ↑ | ↑ |
| 9 | 203939_at | 1419.5 | 448.4 | 1686.73 | ↓ | ↓ |
| 10 | 204073_s_at | 143.9 | 359.77 | 1108.27 | ↓ | ↓ |
| 11 | 204143_s_at | 4459.1 | 469.02 | 1854.93 | ↓ | ↑ |
| 12 | 204204_at | 399.9 | 148.08 | 488.2 | ↓ | ↓ |
| 13 | 204416_x_at | 399.5 | 856.1 | 3347.48 | ↓ | ↓ |
| 14 | 204542_at | 33.7 | 119.03 | 432.17 | ↓ | ↓ |
| 15 | 204584_at | 37.7 | 389.25 | 70.62 | ↑ | ↓ |
| 16 | 204698_at | 13.5 | 181.85 | 590.4 | ↓ | ↓ |
| 17 | 204705_x_at | 149.2 | 270.88 | 1495.58 | ↓ | ↓ |
| 18 | 204714_s_at | 1567.1 | 231.23 | 1197.85 | ↓ | ↑ |
| 19 | 204965_at | 167.5 | 359.55 | 1387.28 | ↓ | ↓ |
| 20 | 204988_at | 1741.6 | 2708 | 13973.72 | ↓ | ↓ |
| 21 | 204992_s_at | 3713.2 | 4082.15 | 905.9 | ↑ | ↑ |
| 22 | 205041_s_at | 99.7 | 196.2 | 2513.82 | ↓ | ↓ |
| 23 | 205108_s_at | 68.8 | 209.98 | 845.3 | ↓ | ↓ |
| 24 | 205229_s_at | 1444.8 | 804.8 | 209.83 | ↑ | ↑ |
| 25 | 205240_at | 1930.1 | 1539.52 | 435.67 | ↑ | ↑ |
| 26 | 205477_s_at | 75.7 | 283.2 | 1155.3 | ↓ | ↓ |
| 27 | 205522_at | 348.5 | 726.27 | 133.53 | ↑ | ↑ |
| 28 | 205604_at | 468.6 | 462.38 | 102.25 | ↑ | ↑ |
| 29 | 205650_s_at | 291.3 | 493.55 | 2904.28 | ↓ | ↓ |
| 30 | 205754_at | 57.9 | 209.75 | 662.38 | ↓ | ↓ |
| 31 | 205755_at | 89 | 141.5 | 680.27 | ↓ | ↓ |
| 32 | 205923_at | 341.9 | 227.28 | 807.67 | ↓ | ↓ |
| 33 | 205969_at | 432.1 | 175.48 | 757.43 | ↓ | ↓ |
| 34 | 206042_x_at | 14.4 | 896.6 | 212.67 | ↑ | ↓ |
| 35 | 206130_s_at | 90.5 | 124.9 | 477.2 | ↓ | ↓ |
| 36 | 206287_s_at | 16.7 | 24.95 | 372.38 | ↓ | ↓ |
| 37 | 206350_at | 430.1 | 555.53 | 2352.27 | ↓ | ↓ |
| 38 | 207267_s_at | 320.6 | 575.88 | 164.03 | ↑ | ↑ |
| 39 | 207761_s_at | 1483.8 | 1638.63 | 5869 | ↓ | ↓ |
| 40 | 208470_s_at | 42.2 | 1226.9 | 15875.23 | ↓ | ↓ |
| 41 | 208510_s_at | 2092.3 | 3005.18 | 776.35 | ↑ | ↑ |
| 42 | 208962_s_at | 894.8 | 1947.03 | 556.83 | ↑ | ↑ |
| 43 | 209555_s_at | 106.7 | 74.35 | 315.28 | ↓ | ↓ |
| 44 | 209699_x_at | 1552.7 | 709.47 | 3046.28 | ↓ | ↓ |
| 45 | 209901_x_at | 20.1 | 46.32 | 346.83 | ↓ | ↓ |
| 46 | 210619_s_at | 18.3 | 37.33 | 301.33 | ↓ | ↓ |
| 47 | 211367_s_at | 94.8 | 88.02 | 393.8 | ↓ | ↓ |
| 48 | 211429_s_at | 1051.3 | 3552.52 | 19699.27 | ↓ | ↓ |
| 49 | 211991_s_at | 130.3 | 229.8 | 1334.97 | ↓ | ↓ |
| 50 | 212224_at | 1499.7 | 141.23 | 716.03 | ↓ | ↑ |
| 51 | 212235_at | 39.5 | 135.98 | 575.18 | ↓ | ↓ |
| 52 | 212850_s_at | 5279 | 3434.2 | 1111.52 | ↑ | ↑ |
| 53 | 213204_at | 247 | 192.18 | 930.65 | ↓ | ↓ |
| 54 | 213343_s_at | 339.1 | 419.13 | 119.17 | ↑ | ↑ |
| 55 | 213568_at | 119.1 | 145.08 | 454.45 | ↓ | ↓ |
| 56 | 213592_at | 315 | 329.2 | 1239.5 | ↓ | ↓ |
| 57 | 213988_s_at | 2517.6 | 1016.7 | 3291.8 | ↓ | ↓ |
| 58 | 214063_s_at | 64.4 | 237.9 | 1677.93 | ↓ | ↓ |
| 59 | 214428_x_at | 632.5 | 779.75 | 2975.48 | ↓ | ↓ |
| 60 | 214456_x_at | 43.1 | 264.88 | 4909.38 | ↓ | ↓ |
| 61 | 214465_at | 30.7 | 66.25 | 762.43 | ↓ | ↓ |
| 62 | 214604_at | 671 | 1215.43 | 131.85 | ↑ | ↑ |
| 63 | 214608_s_at | 56.4 | 572.88 | 28.28 | ↑ | ↑ |
| 64 | 214669_x_at | 43.4 | 200.98 | 624.15 | ↓ | ↓ |
| 65 | 215388_s_at | 180.5 | 336.75 | 1303.15 | ↓ | ↓ |
| 66 | 217767_at | 545.6 | 953.25 | 5588.37 | ↓ | ↓ |
| 67 | 218232_at | 103.5 | 93.93 | 390.22 | ↓ | ↓ |
| 68 | 219508_at | 1915.7 | 2260.57 | 9751.88 | ↓ | ↓ |
| 69 | 219612_s_at | 785.1 | 1133.45 | 7741.42 | ↓ | ↓ |
| 70 | 222162_s_at | 82.5 | 183.68 | 646.53 | ↓ | ↓ |
| 71 | 37020_at | 264.3 | 462.3 | 3024.4 | ↓ | ↓ |
| 72 | 39763_at | 132.1 | 185.4 | 988.95 | ↓ | ↓ |
| 73 | 201564_s_at | 66.3 | 78.93 | 225.8 | ↓ | ↓ |
| 74 | 201645_at | 92.9 | 309.55 | 737.18 | ↓ | ↓ |
| 75 | 202973_x_at | 10022.1 | 4587.02 | 2078.33 | ↑ | ↑ |
| 76 | 203180_at | 35 | 385.6 | 1322 | ↓ | ↓ |
| 77 | 203649_s_at | 264.2 | 110.13 | 329.98 | ↓ | ↓ |
| 78 | 203708_at | 72.6 | 154.7 | 944.08 | ↓ | ↓ |
| 79 | 203771_s_at | 8.6 | 73 | 152.42 | ↓ | ↓ |
| 80 | 203819_s_at | 378.7 | 412.65 | 582.32 | ↓ | ↓ |
| 81 | 203837_at | 1664.9 | 678.42 | 1604.02 | ↓ | ↑ |
| 82 | 204673_at | 40.4 | 176.35 | 3241.4 | ↓ | ↓ |
| 83 | 205097_at | 2962.1 | 1437.68 | 165.6 | ↑ | ↑ |
| 84 | 205278_at | 13.9 | 72.75 | 465.48 | ↓ | ↓ |
| 85 | 205372_at | 2399.6 | 577.25 | 225.62 | ↑ | ↑ |
| 86 | 205414_s_at | 43.9 | 909.3 | 198.15 | ↑ | ↓ |
| 87 | 205767_at | 1720.8 | 950.72 | 440.02 | ↑ | ↑ |
| 88 | 205865_at | 402.3 | 343.2 | 125.48 | ↑ | ↑ |
| 89 | 205927_s_at | 68.5 | 424.82 | 6797.2 | ↓ | ↓ |
| 90 | 205937_at | 218.7 | 247.75 | 120.5 | ↑ | ↑ |
| 91 | 206884_s_at | 97.9 | 49.95 | 245.05 | ↓ | ↓ |
| 92 | 207011_s_at | 178.4 | 290.3 | 97.75 | ↑ | ↑ |
| 93 | 207039_at | 342 | 199.7 | 575.47 | ↓ | ↓ |
| 94 | 207063_at | 62.9 | 100.38 | 435.75 | ↓ | ↓ |
| 95 | 207509_s_at | 63 | 111.95 | 267.15 | ↓ | ↓ |
| 96 | 208262_x_at | 101.3 | 88.7 | 25.38 | ↑ | ↑ |
| 97 | 209125_at | 45.7 | 85.85 | 389.77 | ↓ | ↓ |
| 98 | 209436_at | 98.8 | 430.63 | 2883 | ↓ | ↓ |
| 99 | 209905_at | 6248.2 | 7293.25 | 2925.58 | ↑ | ↑ |
| 100 | 210164_at | 824.8 | 1260.1 | 1018.28 | ↑ | ↓ |
| 101 | 211372_s_at | 34.5 | 170.82 | 520.53 | ↓ | ↓ |
| 102 | 211430_s_at | 112.9 | 247.55 | 1745.92 | ↓ | ↓ |
| 103 | 212349_at | 1199.6 | 1049.9 | 617.35 | ↑ | ↑ |
| 104 | 212531_at | 261.7 | 1850.23 | 9150.78 | ↓ | ↓ |
| 105 | 213230_at | 174.7 | 224.27 | 529.05 | ↓ | ↓ |
| 106 | 213435_at | 7949.7 | 3523.13 | 2242.65 | ↑ | ↑ |
| 107 | 213880_at | 6388.3 | 2524 | 606.27 | ↑ | ↑ |
| 108 | 213994_s_at | 44.1 | 73.4 | 967.63 | ↓ | ↓ |
| 109 | 214677_x_at | 26.7 | 268.77 | 1507.35 | ↓ | ↓ |
| 110 | 216910_at | 56.6 | 112.45 | 43.92 | ↑ | ↑ |
| 111 | 217047_s_at | 5878.7 | 3108.7 | 1366.12 | ↑ | ↑ |
| 112 | 217988_at | 3909.6 | 4618.63 | 2386.77 | ↑ | ↑ |
| 113 | 218445_at | 515.3 | 777.8 | 197.75 | ↑ | ↑ |
| 114 | 219697_at | 122.7 | 205.07 | 350.1 | ↓ | ↓ |
| 115 | 219735_s_at | 559.9 | 1344.83 | 611.62 | ↑ | ↓ |
| 116 | 219764_at | 45.7 | 1375.78 | 76.05 | ↑ | ↓ |
| 117 | 220482_s_at | 285.3 | 314.05 | 107.65 | ↑ | ↑ |
| 118 | 220658_s_at | 235.3 | 181.05 | 302.38 | ↓ | ↓ |
| 119 | 222347_at | 325.8 | 150.07 | 378.72 | ↓ | ↓ |
| 120 | 34210_at | 6.9 | 91.93 | 1517.25 | ↓ | ↓ |

Key:
\textcircled{1} Column
\textcircled{2} Change in the expression level of responders
\textcircled{3} Change in patient T.
Description for Table 5
Table 5 compares the change of the expression level between patient T., responders (Resp) and non-responders (Non-Resp).
Column 1 contains the SEQ ID NOS of the gene
Column 2 contains the Affymetrix Accession Numbers on the HG U-133-A Microarray
Column 3 contains the gene expression of in the liver metastasis of patient T.
Column 4 contains the mean values of the gene expression in the liver metastasis of responders (Resp)
Column 5 contains the mean values of the gene expression in the liver metastasis of non-responders (non-Resp)
Column 6 shows the average change of the expression level in responders
Column 7 shows the change of the expression level in patient T.

[0204] One sees a good agreement between columns 6 and 7 (changes in the expression level that do not match are printed in bold). In total, 66 of the 72 genes from Table 1 (91.7%) and 50 of 55 genes from Table 4 (90.9%) were correctly assigned, which means that patient T., in reference to the gene signature, belongs with high probability to the responders.

[0205] In particular, 27 of the 28 genes of the “minimal set” agree (only one deviation at number 116). Thus the probability that patient T. is a responder is 96%.

[0206] (The expression data of patient T. were not included in the computations, which are based on columns 4 and 5.)

TABLE 6
Expression data colon/rectum mucosa (Muc) versus colorectal primary tumor (Tu) of
n = 12 independent patients according to Example 17 as validation of Table 2

| | | | | Spalte 5 | Spalte 6 | Spalte 7 | | |
|---|---|---|---|---|---|---|---|---|
| \textcircled{1} Spalte 1 | | Spalte 3 | | Fc_Tu | T-Test | Direction | Spalte 8 | Spalte 9 |
| Seq | Spalte 2 | Avg | Spalte 4 | vs | Tu vs | Tu vs | \textcircled{2} | \textcircled{3} |
| ID | Affy_Nr | Mucosa | Avg Tu | Muc | Muc | Muc | Gen-Name | Gen |
| 25 | 205240_at | 305.42 | 2612.66 | 8.55 | 0.001 | Up | LGN protein | LGN |
| 41 | 208510_s_at | 712.09 | 410.26 | −1.74 | 0.002 | Down | Peroxisome | PPARG |
| | | | | | | | proliferative | |
| | | | | | | | activated | |
| | | | | | | | receptor, | |
| | | | | | | | gamma | |
| 68 | 219508_at | 14667.20 | 5657.67 | −2.59 | 0.001 | Down | Glucosaminyl | GCNT3 |
| | | | | | | | (N-acetyl) | |
| | | | | | | | transferase | |
| | | | | | | | 3. mucin type | |

Key:
\textcircled{1} Column
\textcircled{2} Gene name
\textcircled{3} Gene
Description for Table 6
Table 6 lists the Seq ID which, according to Claim 9, allow a differentiation between normal intestinal mucosa and colorectal carcinoma.
Column 1 contains the SEQ ID NOS of the gene
Column 2 contains the Affymetrix Accession Numbers from the HG U-133-A Microarray
Column 3 contains the mean values of the gene expression of (n = 12) colon/rectum mucosa biopsies
Column 4 contains the mean values of the gene expression of (n = 12; corresponding to column 3) colon/rectal carcinoma biopsies
Column 5 contains the difference in the gene expression between tumor and normal tissue indicated as fold-change (Fc)
Column 6 shows the significance level in the t-test
Column 7 shows whether the individual genes in the tumor are upregulated (up) or downregulated (down) (in comparison to normal tissue)
Column 8 contains the names of the genes
Column 9 contains the gene symbol

TABLE A
Prediction of the response of liver metastases to a 5-FU-containing chemotherapy by comparing
responders (Resp; n = 10) and non-responders (Non-Resp; n = 10).

| | | | | | Fold | | | |
|---|---|---|---|---|---|---|---|---|
| | | | | \textcircled{2} | change | \textcircled{3} | | |
| \textcircled{1} Auswahl aus | | | | Expressionsniveau | (Resp | Statistische Signifikanz | | |
| \textcircled{4} 72 Genen | \textcircled{5} 55 Genen | Minimal set | | (Resp vs Non- | vs Non- | (Resp vs Non-Resp) | | |
| (Tab. 1) | (Tab. 4) | \textcircled{6} Spalte 3 | Spalte 4 | Resp) | Resp) | T-Test | Welch | Wllcoxon |
| | | 6 | 6 | ↑ | (−3)-(−5) | 0.000692 | 0.001295 | 0.001243 |
| \textcircled{7} alle | alle | 7 | 7 | ↑ | (−3)-(−5) | 0.002463 | 0.002208 | 0.002176 |
| 72 | 55 | 8 | 8 | ↓ | 4-6 | 0.000500 | 0.004928 | 0.000311 |
| \textcircled{8} Gene | Gene | 10 | | ↑ | (−2)-(−4) | 0.001225 | 0.001537 | 0.001243 |
| | | 13 | 13 | ↑ | (−3)-(−5) | 0.000818 | 0.000815 | 0.003730 |
| | | 14 | | ↑ | (−2)-(−5) | 0.002650 | 0.003274 | 0.001243 |
| | | 24 | 24 | ↓ | 3-5 | 0.000170 | 0.000549 | 0.001243 |
| | | 25 | | ↓ | 2-5 | 0.003655 | 0.008318 | 0.005905 |
| | | 41 | | ↓ | 3-5 | 0.001252 | 0.001718 | 0.003730 |
| | | 45 | 45 | ↑ | (−6)-(−9) | 0.004320 | 0.009322 | 0.009324 |
| | | 46 | 46 | ↑ | (−6)-(−10) | 0.000412 | 0.001005 | 0.006488 |
| | | 48 | 48 | ↑ | (−4)-(−7) | 0.001342 | 0.001544 | 0.001243 |
| | | 52 | 52 | ↓ | 2-4 | 0.007332 | 0.017840 | 0.054080 |
| | | 54 | 54 | ↓ | 2-5 | 0.008371 | 0.012090 | 0.013990 |
| | | 60 | 60 | ↑ | (−15)-(−21) | 0.000174 | 0.000388 | 0.001243 |
| | | 61 | 61 | ↑ | (−9)-(−13) | 0.000107 | 0.000480 | 0.001243 |
| | | 63 | | ↓ | 16-24 | 0.096520 | 0.090670 | 0.147600 |
| | | 65 | 65 | ↑ | (−3)-(−5) | 0.003568 | 0.003485 | 0.003730 |
| | | 66 | 66 | ↑ | (−5)-(−7) | 0.002488 | 0.002510 | 0.002176 |
| | | 68 | | ↑ | (−3)-(−5) | 0.000268 | 0.000282 | 0.000311 |
| | | 73 | 73 | ↑ | (−2)-(−4) | 0.000016 | 0.000015 | 0.000311 |
| | | 78 | 78 | ↑ | (−5)-(−7) | 0.002634 | 0.004401 | 0.005905 |
| | | 79 | 79 | ↑ | (−1)-(−3) | 0.002341 | 0.002162 | 0.003730 |
| | | 80 | 80 | ↑ | (−1)-(−3) | 0.076230 | 0.073200 | 0.152000 |
| | | 89 | 89 | ↑ | (−13)-(−19) | 0.037240 | 0.056650 | 0.093860 |
| | | 97 | 97 | ↑ | (−4)-(−6) | 0.028840 | 0.054100 | 0.028900 |
| | | 98 | 98 | ↑ | (−6)-(−8) | 0.003484 | 0.009664 | 0.009324 |
| | | 101 | 101 | ↑ | (−2)-(−4) | 0.004217 | 0.005559 | 0.009324 |
| | | 104 | 104 | ↑ | (−4)-(−6) | 0.005314 | 0.009279 | 0.003730 |
| | | 107 | 107 | ↓ | 3-5 | 0.001421 | 0.002313 | 0.005905 |
| | | 108 | 108 | ↑ | (−11)-(−15) | 0.001185 | 0.001994 | 0.002176 |
| | | 116 | 116 | ↓ | 15-21 | 0.073320 | 0.069390 | 0.231900 |
| | | 117 | 117 | ↓ | 2-4 | 0.000512 | 0.003814 | 0.000311 |
| | | 120 | 120 | ↑ | (−13)-(−19) | 0.004197 | 0.006615 | 0.005905 |
| 72 | 55 | 34 | 28 | 34 | | | | |

Key:
\textcircled{1} Selection of
\textcircled{2} Expression level
\textcircled{3} Statistical significance (Resp vs Non-Resp)
\textcircled{4} 72 genes (Table 1)
\textcircled{5} 55 genes (Table 4)
\textcircled{6} Column
\textcircled{7} All
\textcircled{8} Genes

TABLE B
Early detection of a colorectal carcinoma by comparing healthy
mucosa (Muc; n = 3) and colorectal carcinoma (Tu; n = 10)

| \textcircled{1} Auswahl aus | | | | |
|---|---|---|---|---|
| \textcircled{3} 72 | \textcircled{4} 55 | | | |
| Genen | Genen | Minimal | \textcircled{2} Δ Expressionsniveau | Fold change |
| (Tab. 2) | (Tab. 3) | set | (Muc vs Tu) | (Muc vs Tu) |
| 2 | | | ↓ | 4-6 |
| 7 | | | ↓ | 1-3 |
| 8 | | | ↑ | (−4)-(−2) |
| 12 | | | ↓ | 1-3 |
| 19 | | | ↓ | 1-3 |
| 21 | | | ↑ | (−1)-(−3) |
| 25 | 25 | 25 | ↑ | (−3)-(−5) |
| 33 | | | ↑ | (−4)-(−6) |
| 38 | | | ↑ | (−4)-(−6) |
| 41 | 41 | 41 | ↓ | 1-3 |
| 45 | | | ↓ | 2-4 |
| 49 | | | ↓ | 6-8 |
| 50 | | | ↓ | 2-4 |
| 51 | | | ↑ | (−3)-(−5) |
| 54 | | | ↑ | (−5)-(−7) |
| 66 | | | ↓ | 1-3 |
| 68 | 68 | 68 | ↓ | 3-5 |
| 70 | | | ↓ | 3-5 |
| | 78 | | ↓ | 1-3 |
| | 83 | | ↓ | 10-14 |
| | 85 | | ↑ | (−2)-(−4) |
| | 86 | | ↓ | 3-5 |
| | 92 | | ↑ | (−2)-(−4) |
| | 99 | | ↑ | (−2)-(−4) |
| | 101 | | ↓ | 6-10 |
| | 103 | | ↑ | (−2)-(−4) |
| | 104 | | ↑ | (−12)-(−17) |
| | 105 | | ↑ | (−4)-(−6) |
| | 109 | | ↓ | 6-8 |
| | 112 | | ↑ | (−1)-(−3) |
| | 114 | | ↓ | 1-3 |
| | 115 | | ↓ | 1-3 |
| | 118 | | ↑ | (−2)-(−4) |
| 18 | 18 | 3 | 33 | |

Key:
\textcircled{1} Selection from
\textcircled{2} Δ Expression level (Muc vs Tu)
\textcircled{3} 72 genes (Table 2)
\textcircled{4} 55 genes (Table 3)

TABLE C
Prediction of liver metastases by comparing liver metastases
(Lm; n = 20) and colorectal carcinoma (Tu; n = 10)

\textcircled{1} Auswahl aus

| \textcircled{3} 72 | \textcircled{4} 55 | | | |
|---|---|---|---|---|
| Genen | Genen | Minimal | \textcircled{2} Δ Expressionsniveau | Fold change |
| (Tab. 2) | (Tab. 3) | set | (Lm vs Tu) | (Lm vs Tu) |
| 17 | | 17 | ↑ | (−2)-(−4) |
| 19 | | 19 | ↑ | (−12)-(−18) |
| 20 | | 20 | ↑ | (−69)-(−99) |
| 22 | | 22 | ↑ | (−26)-(−34) |
| 26 | | 26 | ↑ | (−18)-(−22) |
| 29 | | 29 | ↑ | (−10)-(−16) |
| 30 | | 30 | ↑ | (−6)-(−9) |
| 31 | | 31 | ↑ | (−9)-(−13) |
| 33 | | 33 | ↑ | (−3)-(−5) |
| 35 | | 35 | ↑ | (−4)-(−6) |
| 37 | | 37 | ↑ | (−6)-(−10) |
| 40 | | 40 | ↑ | (−82)-(−124) |
| 48 | | 48 | ↑ | (−3)-(−5) |
| 58 | | 58 | ↑ | (−13)-(−19) |
| 59 | | 59 | ↑ | (−2)-(−4) |
| 64 | | 64 | ↓ | 2-4 |
| 66 | | 66 | ↑ | (−4)-(−6) |
| 69 | | 69 | ↑ | (−66)-(−96) |
| 71 | | 71 | ↑ | (−69)-(−99) |
| 72 | | 72 | ↑ | (−5)-(−7) |
| | 74 | 74 | ↓ | 1-3 |
| | 109 | 109 | ↓ | 3-5 |
| 20 | 2 | 22 | 22 | |

Key:
\textcircled{1} Selection from
\textcircled{2} Δ Expression level (Muc vs Tu)
\textcircled{3} 72 genes (Table 2)
\textcircled{4} 55 genes (Table 3)

TABLE D
Congruence list of the assigned SEQ ID NOs

| | | \textcircled{2} Varianten | | |
|---|---|---|---|---|
| | SEQ ID | dargestellt in | | |
| \textcircled{1} Genname | NO | SEQ ID NO | Affy Nr | Gene |
| ATPase, H+ transporting, lysosomal | 1 | | 200954_at | ATP6V0C |
| 16 kDa, V0 subunit c | | | | |
| major histocompatibility complex, | 2 | | 201137_s_at | HLA-DPB1 |
| class II, DP beta 1 | | | | |
| EGF-containing fibulin-like | 3 | 121 | 201842_s_at | EFEMP1 |
| extracellular matrix protein 1 | | | | |
| complement component 1, q | 4 | | 202953_at | C1QB |
| subcomponent, beta polypeptide | | | | |
| phosphorylase, glycogen; liver (Hers | 5 | | 202990_at | PYGL |
| disease) | | | | |
| apolipoprotein E | 6 | | 203382_s_at | APOE |
| CD163 antigen | 7 | | 203645_s_at | CD163 |
| phospholipase C, beta 4 | 8 | 122 | 203895_at | PLCB4 |
| 5′-nucleotidase, ecto (CD73) | 9 | | 203939_at | NT5E |
| chromosome 11 open reading frame 9 | 10 | | 204073_s_at | C11orf9 |
| rTS beta protein | 11 | | 204143_s_at | HSRTSBETA |
| solute carrier family 31 (copper | 12 | | 204204_at | SLC31A2 |
| transporters), member 2 | | | | |
| apolipoprotein C-I | 13 | | 204416_x_at | APOC1 |
| sialyltransferase | 14 | | 204542_at | STHM |
| L1 cell adhesion molecule | 15 | 123 | 204584_at | LICAM |
| (hydrocephalus, stenosis of aqueduct | | | | |
| of Sylvius 1) | | | | |
| interferon stimulated gene 20 kDa | 16 | | 204698_at | ISG20 |
| aldolase B, fructose-bisphosphate | 17 | | 204705_x_at | ALDOB |
| coagulation factor V (proaccelerin, | 18 | | 204714_s_at | F5 |
| labile factor) | | | | |
| group-specific component (vitamin D | 19 | | 204965_at | GC |
| binding protein) | | | | |
| fibrinogen, B beta polypeptide | 20 | | 204988_at | FGB |
| profilin 2 | 21 | 124 | 204992_s_at | PFN2 |
| orosomucoid 1 | 22 | | 205041_s_at | ORM1 |
| apolipoprotein B (including Ag(x) | 23 | | 205108_s_at | APOB |
| antigen) | | | | |
| coagulation factor C homolog, cochlin | 24 | | 205229_s_at | COCH |
| (Limulus polyphemus) | | | | |
| LGN protein | 25 | | 205240_at | LGN |
| alpha-1-microglobulin/bikunin | 26 | | 205477_s_at | AMBP |
| precursor | | | | |
| homeo box D4 | 27 | | 205522_at | HOXD4 |
| homeo box D9 | 28 | | 205604_at | HOXD9 |
| fibrinogen, A alpha polypeptide | 29 | 125 | 205650_s_at | FGA |
| coagulation factor II (thrombin) | 30 | | 205754_at | F2 |
| pre-alpha (globulin) inhibiter, H3 | 31 | | 205755_at | ITIH3 |
| polypeptide | | | | |
| reelin | 32 | 126 | 205923_at | RELN |
| arylacetamide deacetylase (esterase) | 33 | | 205969_at | AADAC |
| small nuclear ribonucleoprotein | 34 | 127, 128, 129, | 206042_x_at | SNRPN |
| polypeptide N | | 130, 131, 132 | | |
| asialoglycoprotein receptor 2 | 35 | 133, 134, 135 | 206130_s_at | ASGR2 |
| inter-alpha (globulin) inhibitor H4 | 36 | | 206287_s_at | ITIH4 |
| (plasma Kallikrein-sensitive | | | | |
| glycoprotein) | | | | |
| amyloid P component, serum | 37 | | 206350_at | APCS |
| Down syndrome critical region gene 6 | 38 | | 207267_s_at | DSCR6 |
| DKFZP586A0522 protein | 39 | | 207761_s_at | DKFZP586A0522 |
| haptoglobin | 40 | | 208470_s_at | HP |
| peroxisome proliferative activated | 41 | 136, 137, 138 | 208510_s_at | PPARG |
| receptor, gamma | | | | |
| fatty acid desaturase 1 | 42 | | 208962_s_at | FADS1 |
| CD36 antigen (collagen type I | 43 | | 209555_s_at | CD36 |
| receptor, thrombospondin receptor) | | | | |
| aldo-keto reductase family 1, member | 44 | | 209699_x_at | AKR1C2 |
| C2 (dihydrodiol dehydrogenase 2) | | | | |
| allograft inflammatory factor 1 | 45 | 139, 140 | 209901_x_at | AIF1 |
| hyaluronoglucosaminidase 1 | 46 | 141, 142, 143, | 210619_s_at | HYAL1 |
| | | 144, 145, 146, | | |
| | | 147 | | |
| caspase 1, apoptosis-related cysteine | 47 | 148, 149, 150 | 211367_s_at | CASP1 |
| protease (ICE-1) | | | | |
| alpha-1 Antitrypsin | 48 | 151, 152 | 211429_s_at | SERPINA1 |
| major histocompatibility complex, | 49 | | 211991_s_at | FILA-DPA1 |
| class II, DP alpha 1 | | | | |
| aldehyde dehydrogenase 1 family, | 50 | | 212224_at | ALDH1A1 |
| member A1 | | | | |
| plexin D1 | 51 | | 212235_at | PLXND1 |
| low density lipoprotein receptor- | 52 | | 212850_s_at | LRP4 |
| related protein 4 | | | | |
| p53-associated parkin-like | 53 | | 213204_at | PARC |
| cytoplasmic protein | | | | |
| hypothetical protein PP1665 | 54 | | 213343_s_at | PP1665 |
| odd-skipped-related 2A protein | 55 | | 213568_at | OSR2 |
| angiotensin II receptor-like 1 | 56 | | 213592_at | AGTRL1 |
| spermidine/spermine N1- | 57 | | 213988_s_at | SAT |
| acetyltransferase | | | | |
| transferrin | 58 | | 214063_s_at | TF |
| complement component 4A | 59 | | 214428_x_at | C4A |
| serum amyloid A2 | 60 | | 214456_x_at | SAA2 |
| orosomucoid 2 | 61 | | 214465_at | ORM2 |
| homeo box D11 | 62 | | 214604_at | HOXD11 |
| eyes absent homolog 1 (Drosophila) | 63 | 153, 154, 155 | 214608_s_at | EYA1 |
| similar to Human Ig rearranged | 64 | | 214669_x_at | na |
| gamma chain mRNA, V-J-C region | | | | |
| H factor (complement)-like 1 | 65 | | 215388_s_at | HFL1 |
| complement component 3 | 66 | | 217767_at | C3 |
| complement component 1, q | 67 | | 218232_at | C1QA |
| subcomponent, alpha polypeptide | | | | |
| glucosaminyl (N-acetyl) transferase 3, | 68 | | 219508_at | GCNT3 |
| mucin type | | | | |
| fibrinogen, gamma polypeptide | 69 | 156 | 219612_s_at | FGG |
| a disintegrin-like and metalloprotease | 70 | | 222162_s_at | ADAMTS1 |
| with thrombospondin type 1 | | | | |
| C-reactive protein, pentraxin-related | 71 | | 37020_at | CRP |
| hemopexin | 72 | | 39763_at | HPX |
| fascin homolog 1, actin-bundling | 73 | | 201564_s_at | FSCN1 |
| protein (Strongylocentrotus | | | | |
| purpuratus) | | | | |
| tenascin C (hexabrachion) | 74 | | 201645_at | TNC |
| family with sequence similarity 13, | 75 | | 202973_x_at | FAM13A1 |
| member A1 | | | | |
| aldehyde dehydrogenase 1 family, | 76 | | 203180_at | ALDH1A3 |
| member A3 | | | | |
| phospholipase A2, group IIA | 77 | | 203649_s_at | PLA2G2A |
| (platelets, synovial fluid) | | | | |
| phosphodiesterase 4B, cAMP-specific | 78 | 157 | 203708_at | PDE4B |
| (phosphodiesterase E4 dunce | | | | |
| homolog, Drosophila) | | | | |
| biliverdin reductase A | 79 | | 203771_s_at | BLVRA |
| IGF-II mRNA-binding protein 3 | 80 | | 203819_s_at | IMP-3 |
| mitogen-activated protein kinase | 81 | | 203837_at | MAP3K5 |
| kinase kinase 5 | | | | |
| mucin 2, intestinal/tracheal /// mucin | 82 | | 204673_at | MUC2 |
| 2, intestinal/tracheal | | | | |
| solute carrier family 26 (sulfate | 83 | | 205097_at | SLC26A2 |
| transporter), member 2 | | | | |
| glutamate decarboxylase 1 (brain, | 84 | | 205278_at | GAD1 |
| 67 kDa) | | | | |
| pleiomorphic adenoma gene 1 | 85 | | 205372_at | PLAG1 |
| KIAA0672 gene product | 86 | | 205414_s_at | KIAA0672 |
| cpiregulin | 87 | | 205767_at | EREG |
| dead ringer-like 1 (Drosophila) | 88 | | 205865_at | DRIL1 |
| cathepsin E | 89 | 181 | 205927_s_at | CTSE |
| cell growth regulator with EF hand | 90 | | 205937_at | CGREF1 |
| domain 1 | | | | |
| sciellin | 91 | 158 | 206884_s_at | SCEL |
| PTK7 protein tyrosine kinase 7 | 92 | 159, 160, 161, | 207011_s_at | PTK7 |
| | | 162 | | |
| cyclin-dependent kinase inhibitor 2A | 93 | 163, 164, 165 | 207039_at | CDKN2A |
| (melanoma, p16, inhibits CDK4) | | | | |
| chromosome Y open reading frame 14 | 94 | | 207063_at | CYorf14 |
| leukocyte-associated Ig-like receptor 2 | 95 | 166 | 207509_s_at | LAIR2 |
| Mediterranean fever | 96 | | 208262_x_at | MEFV |
| keratin 6A | 97 | 167, 168 | 209125_at | KRT6A |
| spondin 1, (f-spondin) extracellular | 98 | 169 | 209436_at | SPON1 |
| matrix protein | | | | |
| homeo box A9 | 99 | 170 | 209905_at | HOXA9 |
| granzyme B (granzyme 2, cytotoxic | 100 | | 210164_at | GZMB |
| T-lymphocyte-associated serine | | | | |
| esterase 1) | | | | |
| interleukin 1 receptor, type II | 101 | 171, 172 | 211372_s_at | IL1R2 |
| immunoglobulin heavy constant | 102 | 173 | 211430_s_at | IGHG3 |
| gamma 3 (G3m marker) | | | | |
| protein O-fucosyltransferase 1 | 103 | 174 | 212349_at | POFUT1 |
| lipocalin 2 (oncogene 24p3) | 104 | | 212531_at | LCN2 |
| paraneoplastic antigen | 105 | | 213230_at | HUMPPA |
| SATB family member 2 | 106 | 175 | 213435_at | SATB2 |
| G protein-coupled receptor 49 | 107 | | 213880_at | GPR49 |
| spondin 1, (f-spondin) extracellular | 108 | 176 | 213994_s_at | SPON1 |
| matrix protein | | | | |
| immunoglobulin lambda joining 3 | 109 | 177 | 214677_x_at | IGLJ3 |
| — | 110 | | 216910_at | — |
| family with sequence similarity 13, | 111 | | 217047_s_at | FAM13A1 |
| member A1 | | | | |
| chromosome 14 open reading frame | 112 | 178, 179, 180 | 217988_at | C14orf18 |
| 18 | | | | |
| H2A histone family, member Y2 | 113 | | 218445_at | H2AFY2 |
| heparan sulfate (glucosamine) 3-O- | 114 | | 219697_at | HS3ST2 |
| sulfotransferase 2 | | | | |
| LBP protein; likely ortholog of mouse | 115 | | 219735_s_at | LBP-9 |
| CRTR-1 | | | | |
| frizzled homolog 10 (Drosophila) | 116 | | 219764_at | FZD10 |
| deafness locus associated putative | 117 | | 220482_s_at | DELGEF |
| guanine nucleotide exchange factor | | | | |
| aryl hydrocarbon receptor nuclear | 118 | | 220658_s_at | ARNTL2 |
| translocator-like 2 | | | | |
| Homo sapiens transcribed sequence | 119 | | 222347_at | — |
| with weak similarity to protein | | | | |
| ref: NP_009056.1 (H. sapiens) | | | | |
| ubiquitously transcribed | | | | |
| tetratricopeptide repeat gene, Y | | | | |
| chromosome; Ubiquitously | | | | |
| transcribed TPR gene on Y | | | | |
| chromosome [Homo sapiens] | | | | |
| CDW52 antigen (CAMPATH-1 | 120 | | 34210_at | CDW52 |
| antigen) | | | | |

Key:
\textcircled{1} Gene name
\textcircled{2} Variants represented in SEQ ID NO
3 Affy No.

[0207] The concept “variant,” in this invention, regarding the 120 genes disclosed here, comprises splice variants and also homologous or highly homologous genes.

The application's sequence listing, which the Patent Office published only in electronic form, follows.

SEQUENCE LISTING (181 sequences)

SEQ ID NO: 1 - DNA, 1126 bp, homo sapiens
gttctgcggtgctggtatttagagcgcagcggctgacgggccggatcgccttcgccgccgcccgcccgcaaaccttcgtgcccggcccgtcctcgcccccgcctccgccaccgcctcggcccgcagagcttgccccctccccacccgcagacatgtccgagtccaagagcggccccgagtatgcttcgtttttcgccgtcatgggcgcctcggccgccatggtcttcagcgccctgggcgctgcctatggcacagccaagagcggtaccggcattgcggccatgtctgtcatgcggccggagcagatcatgaagtccatcatcccagtggtcatggctggcatcatcgccatctacggcctggtggtggcagtcctcatcgccaactccctgaatgacgacatcagcctctacaagagcttcctccagctgggcgccggcctgagcgtgggcctgagcggcctggcagccggctttgccatcggcatcgtgggggacgctggcgtgcggggcaccgcccagcagccccgactattcgtgggcatgatcctgattctcatcttcgccgaggtgctcggcctctacggtctcatcgtcgccctcatcctctccacaaagtagaccctctccgagcccaccagccacagaatattatgtaaagaccacccctcctcattccagaacgaacagcctgacacatacgcacggggccgccgcccccagtagttggtcttgtacatgcgcagtgtcctagtgcccatcgtctgtttccccggccttgcccccgcccgccccgtgccgtggacatctgggcccactcatcgcccctccaggcccccggcgccccaccccctagagtgctctgtgtatgcggatgatttagaattgtcatttctctttactggatgtttatttataaagatctggcctgttcctgcgtctgcggagcggcccttgtctcccagctatctataaccttagctagagtgtcgccttgtgggttcctgttgctgagacttcctggatggagccgccctcaccgccgggcccgtggccctgcgcggagctgtgtccaataaagttcttggatgtgaaaaaaaaaaaaaaaaaaaaaaaaaaaaaaaaaa

SEQ ID NO: 2 - DNA, 1501 bp, homo sapiens
agcgagtccttcttttcctgactgcagctcttttcattttgccatccttttccagctccatgatggttctgcaggtttctgcggccccccggacagtggctctgacggcgttactgatggtgctgctcacatctgtggtccagggcagggccactccagagaattaccttttccagggacggcaggaatgctacgcgtttaatgggacacagcgcttcctggagagatacatctacaaccgggaggagttcgcgcgcttcgacagcgacgtgggggagttccgggcggtgacggagctggggcggcctgctgcggagtactggaacagccagaaggacatcctggaggagaagcgggcagtgccggacaggatgtgcagacacaactacgagctgggcgggcccatgaccctgcagcgccgagtccagcctagggtgaatgtttccccctccaagaaggggcccttgcagcaccacaacctgcttgtctgccacgtgacggatttctacccaggcagcattcaagtccgatggttcctgaatggacaggaggaaacagctggggtcgtgtccaccaacctgatccgtaatggagactggaccttccagatcctggtgatgctggaaatgaccccccagcagggagatgtctacacctgccaagtggagcacaccagcctggatagtcctgtcaccgtggagtggaaggcacagtctgattctgcccggagtaagacattgacgggagctgggggcttcgtgctggggctcatcatctgtggagtgggcatcttcatgcacaggaggagcaagaaagttcaacgaggatctgcataaacagggttcctgagctcactgaaaagactattgtgccttaggaaaagcatttgctgtgtttcgttagcatctggctccaggacagaccttcaacttccaaattggatactgctgccaagaagttgctctgaagtcagtttctatcattctgctctttgattcaaagcactgtttctctcactgggcctccaaccatgttcccttcttcttagcaccacaaataatcaaaacccaacatgactgtttgttttcctttaaaaatatgcaccaaatcatctctcatcacttttctctgagggttttagtagacagtaggagttaataaagaagttcattttggtttaaacataggaaagaagagaaccatgaaaatggggatatgttaactattgtataatggggcctgttacacatgacactcttctgaattgactgtatttcagtgagctgcccccaaatcaagtttagtgccctcatccatttatgtctcagaccactattcttaactattcaatggtgagcagactgcaaatctgcctgataggacccatattcccacagcactaattcaacatataccttactgagagcatgttttatcattaccattaagaagttaaatgaacatcagaatttaaaatcataaatataatctaatacacttt

SEQ ID NO: 3 - DNA, 2742 bp, homo sapiens
ctagtattctactagaactggaagattgctctccgagttttttttttgttattttgttaaaaaataaaaagcttgagcagcaattcatattactgtcacaggtatttttgctgtgctgtgcaaggtaactctgctagctaagattcacaatgttgaaagcccttttcctaactatgctgactctggcgctggtcaagtcacaggacaccgaagaaaccatcacgtacacgcaatgcactgacggatatgagtgggatcctgtgagacagcaatgcaaagatattgatgaatgtgacattgtcccagacgcttgtaaaggtggaatgaagtgtgtcaaccactatggaggatacctctgccttccgaaaacagcccagattattgtcaataatgaacagcctcagcaggaaacacaaccagcagaaggaacctcaggggcaaccaccggggttgtagctgccagcagcatggcaaccagtggagtgttgcccgggggtggttttgtggccagtgctgctgcagtcgcaggccctgaaatgcagactggccgaaataactttgtcatccggcggaacccagctgaccctcagcgcattccctccaacccttcccaccgtatccagtgtgcagcaggctacgagcaaagtgaacacaacgtgtgccaagacatagacgagtgcactgcagggacgcacaactgtagagcagaccaagtgtgcatcaatttacggggatcctttgcatgtcagtgccctcctggatatcagaagcgaggggagcagtgcgtagacatagatgaatgtaccatccctccatattgccaccaaagatgcgtgaatacaccaggctcattttattgccagtgcagtcctgggtttcaattggcagcaaacaactatacctgcgtagatataaatgaatgtgatgccagcaatcaatgtgctcagcagtgctacaacattcttggttcattcatctgtcagtgcaatcaaggatatgagctaagcagtgacaggctcaactgtgaagacattgatgaatgcagaacctcaagctacctgtgtcaatatcaatgtgtcaatgaacctgggaaattctcatgtatgtgcccccagggataccaagtggtgagaagtagaacatgtcaagatataaatgagtgtgagaccacaaatgaatgccgggaggatgaaatgtgttggaattatcatggcggcttccgttgttatccacgaaatccttgtcaagatccctacattctaacaccagagaaccgatgtgtttgcccagtctcaaatgccatgtgccgagaactgccccagtcaatagtctacaaatacatgagcatccgatctgataggtctgtgccatcagacatcttccagatacaggccacaactatttatgccaacaccatcaatacttttcggattaaatctggaaatgaaaatggagagttctacctacgacaaacaagtcctgtaagtgcaatgcttgtgctcgtgaagtcattatcaggaccaagagaacatatcgtggacctggagatgctgacagtcagcagtatagggaccttccgcacaagctctgtgttaagattgacaataatagtggggccattttcattttagtcttttctaagagtcaaccacaggcatttaagtcagccaaagaatattgttaccttaaagcactattttatttatagatatatctagtgcatctacatctctatactgtacactcacccataacaaacaattacaccatggtataaagtgggcatttaatatgtaaagattcaaagtttgtctttattactatatgtaaattagacattaatccactaaactggtcttcttcaagagagctaagtatacactatctggtgaaacttggattctttcctataaaagtgggaccaagcaatgatgatcttctgtggtgcttaaggaaacttactagagctccactaacagtctcataaggaggcagccatcataaccattgaatagcatgcaagggtaagaatgagtttttaactgctttgtaagaaaatggaaaaggtcaataaagatatatttctttagaaaatggggatctgccatatttgtgttggtttttattttcatatccagcctaaaggtggttgtttattatatagtaataaatcattgctgtacaacatgctggtttctgtagggtatttttaattttgtcagaaattttagattgtgaatattttgtaaaaaacagtaagcaaaattttccagaattcccaaaatgaaccagataccccctagaaaattatactattgagaaatctatggggaggatatgagaaaataaattccttctaaaccacattggaactgacctgaagaagcaaactcggaaaatataataacatccctgaattcaggcattcacaagatgcagaacaaaatggataaaaggtatttcactggagaagttttaatttctaagtaaaatttaaatcctaacacttcactaatttataactaaaatttctcatcttcgtacttgatgctcacagaggaagaaaatgatgatggtttttattcctggcatccagagtgacagtgaacttaagcaaattaccctcctacccaattctatggaatattttatacgtctccttgtttaaaatctgactgctttactttgatgtatcatatttttaaataaaaataaatattcctttagaagatcactctaaaa

SEQ ID NO: 4 - DNA, 1072 bp, homo sapiens
gataggatcaccacggtggtaacctctcacattgtcttctccacaggaggcgtctgacacagtatgatgatgaagatcccatggggcagcatcccagtactgatcttgctcctgctcctgggcctaatcgatatctcccaggcccagctcagctgcaccgggcccccagccatccctggcatcccgggtatccctgggacacctggccccgatggccaacctgggaccccagggataaaaggagagaaagggcttccagggctggctggagaccatggtgagttcggagagaagggagacccagggattcctgggaatccaggaaaagtcggccccaagggccccatgggccctaaaggtggcccaggggcccctggagccccaggccccaaaggtgaatcgggagactacaaggccacccagaaaatcgccttctctgccacaagaaccatcaacgtccccctgcgccgggaccagaccatccgcttcgaccacgtgatcaccaacatgaacaacaattatgagccccgcagtggcaagttcacctgcaaggtgcccggtctctactacttcacctaccacgccagctctcgagggaacctgtgcgtgaacctcatgcgtggccgggagcgtgcacagaaggtggtcaccttctgtgactatgcctacaacaccttccaggtcaccaccggtggcatggtcctcaagctggagcagggggagaacgtcttcctgcaggccaccgacaagaactcactactgggcatggagggtgccaacagcatcttttccgggttcctgctctttccagatatggaggcctgacctgtgggctgcttcacatccaccccggctccccctgccagcaacgctcactctacccccaacaccaccccttgcccagccaatggacacagtagggcttggtgaatgctgctgagtgaatgagtaaataaactcttcaaggccaaggaacagtggtctaattcaactctgtgtcccagcactggcacaccagaagtgccatgctcagaaatgttggttacatgaatgaatgaaccatgaatgaatg

SEQ ID NO: 5 - DNA, 2828 bp, homo sapiens
gttgaaagctcctggcgcggcggggcggactccacccctgcccggcagcccagcgcctccggccgcacttccagctctctgcgcagcccgccgcgcagcccgccgccccagccatgggcgaaccgctgacagaccaggagaagcggcggcagatcagcatccgcggcatcgtgggcgtggagaacgtggcagagctgaagaagagtttcaaccggcacctgcacttcacgctggtcaaggaccgcaacgtggccaccacccgcgactactacttcgcgctggcgcacacggtgcgggaccacctggtggggcgctggatccgcacgcagcagcactactacgacaagtgccccaagagggaatattacctctctctggaattttacatgggccgaacattacagaacaccatgatcaacctcggtctgcaaaatgcctgtgatgaggccatttaccagcttggattggatatagaagagttagaagaaattgaagaagatgctggacttggcaatggtggtcttgggagacttgctgcctgcttcttggattccatggcaaccctgggacttgcagcctatggatacggcattcggtatgaatatgggattttcaatcagaagatccgagatggatggcaggtagaagaagcagatgattggctcagatatggaaacccttgggagaagtcccgcccagaattcatgctgcctgtgcacttctatggaaaagtagaacacaccaacaccgggaccaagtggattgacactcaagtggtcctggctctgccatatgacacccccgagcccggctacatgaataacactgtcaacaccatgcgcctctggtctgctcgggcaccaaatgactttaacctcagagactttaatgttggagactacattcaggctgtgctggaccgaaacctggccgagaacatctcccgggtcctctatcccaatgacaatttttttgaagggaaggagctaagattgaagcaggaatactttgtggtggctgcaaccttgcaagatatcatccgccgtttcaaagcctccaagtttggctccacccgtggtcaaggaactgtgtttgatgccttcccggatcaggtggccatccagctgaatgatactcaccctcgcatcgcgatccctgagctgatgaggatttttgtggatattgaaaaactgccctggtccaaggcatgggagctcaaccagaagaccttcgcctacaccaaccacacagtgctcccggaagccctggagcgctggcccgtggacctggtggagaagctgctccctcgacatttggaaatcatttatgagataaatcagaagcatttagatagaattgtggccttgtttcctaaagatgtggaccctctgagaaggatgtctctgatagaagaggaaggaagcaaaaggatcaacatggcccatctctgcattgtcggttcccatgctgtgaatggcgtggctaaaatccactcagacatcgtgaagactaaagtattcaaggacttcagtgagctagaacctgacaagtttcagaataaaaccaatgggatcactccaaggcgctggctcctactctgcaacccaggacttgcagagctcatagcagagaaaattggagaagactatgtgaaagacctgagccagctgacgaagctccacagcttcctgggtgatgatgtcttcctccgggaactcgccaaggtgaagcaggagaataagctgaagttttctcagttcctggagacggagtacaaagtgaagatcaacccatcctccatgtttgatgtccaggtgaagaggatacatgagtacaagcgacagctcttgaactgtctgcatgtgatcacgatgtacaaccgcattaagaaagaccctaagaagttattcgtgccaaggacagttatcattggtggtaaagctgccccaggatatcacatggccaaaatgatcataaagctgatcacttcagtggcagatgtggtgaacaatgaccctatggttggaagcaagttgaaagtcatcttcttggagaactacagagtatctcttgctgaaaaagtcattccagccacagatctgtcagagcagatttccactgcaggcaccgaagcctcggggacaggcaatatgaagttcatgctaaatggggccctaactatcgggaccatggatggggccaatgtggaaatggcagaagaagctggggaagagaacctgttcatctttggcatgagcatagatgatgtggctgctttggacaagaaagggtacgaggcaaaagaatactatgaggcacttccagagctgaagctggtcattgatcaaattgacaatggctttttttctcccaagcagcctgacctcttcaaagatatcatcaacatgctattttatcatgacaggtttaaagtctttgcagactacgaagcctatgtcaagtgtcaagataaagtgagtcagctgtacatgaatccaaaggcctggaacacaatggtactcaaaaacatagctgcctcggggaaattctccagtgaccgaacaattaaagaatatgcccaaaacatctggaacgtggaaccttcagatctaaagatttctctatccaatgaatctaacaaagtcaatggaaattgaactctacaatgtctctagaaaacatagcttcttactgaacttgaacatttttacaacattcactggtttttgttttgttagctaataatctataatagttgagtatctctgggaatggggagggaaattatatgtaatagagcttaaaaataaagtgtcaatttccaagga

SEQ ID NO: 6 - DNA, 1156 bp, homo sapiens
cgcagcggaggtgaaggacgtccttccccaggagccgactggccaatcacaggcaggaagatgaaggttctgtgggctgcgttgctggtcacattcctggcaggatgccaggccaaggtggagcaagcggtggagacagagccggagcccgagctgcgccagcagaccgagtggcagagcggccagcgctgggaactggcactgggtcgcttttgggattacctgcgctgggtgcagacactgtctgagcaggtgcaggaggagctgctcagctcccaggtcacccaggaactgagggcgctgatggacgagaccatgaaggagttgaaggcctacaaatcggaactggaggaacaactgaccccggtggcggaggagacgcgggcacggctgtccaaggagctgcaggcggcgcaggcccggctgggcgcggacatggaggacgtgtgcggccgcctggtgcagtaccgcggcgaggtgcaggccatgctcggccagagcaccgaggagctgcgggtgcgcctcgcctcccacctgcgcaagctgcgtaagcggctcctccgcgatgccgatgacctgcagaagcgcctggcagtgtaccaggccggggcccgcgagggcgccgagcgcggcctcagcgccatccgcgagcgcctggggcccctggtggaacagggccgcgtgcgggccgccactgtgggctccctggccggccagccgctacaggagcgggcccaggcctggggcgagcggctgcgcgcgcggatggaggagatgggcagccggacccgcgaccgcctggacgaggtgaaggagcaggtggcggaggtgcgcgccaagctggaggagcaggcccagcagatacgcctgcaggccgaggccttccaggcccgcctcaagagctggttcgagcccctggtggaagacatgcagcgccagtgggccgggctggtggagaaggtgcaggctgccgtgggcaccagcgccgcccctgtgcccagcgacaatcactgaacgccgaagcctgcagccatgcgaccccacgccaccccgtgcctcctgcctccgcgcagcctgcagcgggagaccctgtccccgccccagccgtcctcctggggtggaccctagtttaataaagattcaccaagtttcacgc

SEQ ID NO: 7 - DNA, 3806 bp, homo sapiens
gaattcttagttgttttctttagaagaacatttctagggaataatacaagaagatttaggaatcattgaagttataaatctttggaatgagcaaactcagaatggtgctacttgaagactctggatctgctgacttcagaagacattttgtcaacttgagtcccttcaccattactgtggtcttacttctcagtgcctgttttgtcaccagttctcttggaggaacagacaaggagctgaggctagtggatggtgaaaacaagtgtagcgggagagtggaagtgaaagtccaggaggagtggggaacggtgtgtaataatggctggagcatggaagcggtctctgtgatttgtaaccagctgggatgtccaactgctatcaaagcccctggatgggctaattccagtgcaggttctggacgcatttggatggatcatgtttcttgtcgtgggaatgagtcagctctttgggattgcaaacatgatggatggggaaagcatagtaactgtactcaccaacaagatgctggagtgacctgctcagatggatccaatttggaaatgaggctgacgcgtggagggaatatgtgttctggaagaatagagatcaaattccaaggacggtggggaacagtgtgtgatgataacttcaacatagatcatgcatctgtcatttgtagacaacttgaatgtggaagtgctgtcagtttctctggttcatctaattttggagaaggctctggaccaatctggtttgatgatcttatatgcaacggaaatgagtcagctctctggaactgcaaacatcaaggatggggaaagcataactgtgatcatgctgaggatgctggagtgatttgctcaaagggagcagatctgagcctgagactggtagatggagtcactgaatgttcaggaagattagaagtgagattccaaggagaatgggggacaatatgtgatgacggctgggacagttacgatgctgctgtggcatgcaagcaactgggatgtccaactgccgtcacagccattggtcgagttaacgccagtaagggatttggacacatctggcttgacagcgtttcttgccagggacatgaacctgctgtctggcaatgtaaacaccatgaatggggaaagcattattgcaatcacaatgaagatgctggcgtgacatgttctgatggatcagatctggagctaagacttagaggtggaggcagccgctgtgctgggacagttgaggtggagattcagagactgttagggaaggtgtgtgacagaggctggggactgaaagaagctgatgtggtttgcaggcagctgggatgtggatctgcactcaaaacatcttatcaagtgtactccaaaatccaggcaacaaacacatggctgtttctaagtagctgtaacggaaatgaaacttctctttgggactgcaagaactggcaatggggtggacttacctgtgatcactatgaagaagccaaaattacctgctcagcccacagggaacccagactggttggaggggacattccctgttctggacgtgttgaagtgaagcatggtgacacgtggggctccatctgtgattcggacttctctctggaagctgccagcgttctatgcagggaattacagtgtggcacagttgtctctatcctggggggagctcactttggagagggaaatggacagatctgggctgaagaattccagtgtgagggacatgagtcccatctttcactctgcccagtagcaccccgcccagaaggaacttgtagccacagcagggatgttggagtagtctgctcaagatacacagaaattcgcttggtgaatggcaagaccccgtgtgagggcagagtggagctcaaaacgcttggtgcctggggatccctctgtaactctcactgggacatagaagatgcccatgttctttgccagcagcttaaatgtggagttgccctttctaccccaggaggagcacgttttggaaaaggaaatggtcagatctggaggcatatgtttcactgcactgggactgagcagcacatgggagattgtcctgtaactgctctaggtgcttcattatgtccttcagagcaagtggcctctgtaatctgctcaggaaaccagtcccaaacactgtcctcgtgcaattcatcgtctttgggcccaacaaggcctaccattccagaagaaagtgctgtggcctgcatagagagtggtcaacttcgcctggtaaatggaggaggtcgctgtgctgggagagtagagatctatcatgagggctcctggggcaccatctgtgatgacagctgggacctgagtgatgcccacgtggtttgcagacagctgggctgtggagaggccattaatgccactggttctgctcattttggggaaggaacagggcccatctggctggatgagatgaaatgcaatggaaaagaatcccgcatttggcagtgccattcacacggctgggggcagcaaaattgcaggcacaaggaggatgcgggagttatctgctcagaattcatgtctctgagactgaccagtgaagccagcagagaggcctgtgcagggcgtctggaagttttttacaatggagcttggggcactgttggcaagagtagcatgtctgaaaccactgtgggtgtggtgtgcaggcagctgggctgtgcagacaaagggaaaatcaaccctgcatctttagacaaggccatgtccattcccatgtgggtggacaatgttcagtgtccaaaaggacctgacacgctgtggcagtgcccatcatctccatgggagaagagactggccagcccctcggaggagacctggatcacatgtgacaacaagataagacttcaggaaggacccacttcctgttctggacgtgtggagatctggcatggaggttcctgggggacagtgtgtgatgactcttgggacttggacgatgctcaggtggtgtgtcaacaacttggctgtggtccagctttgaaagcattcaaagaagcagagtttggtcaggggactggaccgatatggctcaatgaagtgaagtgcaaagggaatgagtcttccttgtgggattgtcctgccagacgctggggccatagtgagtgtgggcacaaggaagacgctgcagtgaattgcacagatatttcagtgcagaaaaccccacaaaaagccacaacaggtcgctcatcccgtcagtcatcctttattgcagtcgggatccttggggttgttctgttggccattttcgtcgcattattcttcttgactaaaaagcgaagacagagacagcggcttgcagtttcctcaagaggagagaacttagtccaccaaattcaataccgggagatgaattcttgcctgaatgcagatgatctggacctaatgaattcctcagaaaattcccatgagtcagctgatttcagtgctgctgaactaatttctgtgtctaaatttcttcctatttctggaatggaaaaggaggccattctgagccacactgaaaaggaaaatgggaatttataacccagtgagttcagcctttaagataccttgatgaagacctggactattgaatggagcagaaattcacctctctcactgactattacagttgcatttttatggagttcttcttctcctaggattcctaagactgctgctgaatttataaaaattaagtttgtgaatgtgactacttagtggtgtatatgagactttcaagggaattaaataaataaataagaatgttattgatttgagtttgctttaatt

SEQ ID NO: 8 - DNA, 5546 bp, homo sapiens
aggaaaagacaatttctctctgattcagaatcctgaaaatgtgatctcccttaaaaagaggacagtgctgctgtgagtttgacgaagtggacatcacctgcagtcagtccagagctgcccagtcttgaatataatcatggccaaaccttatgaatttaactggcagaaggaagttccctcctttttgcaagaaggaacagtttttgacagatacgaggaggaatcctttgtgtttgaacccaactgcctcttcaaagtggatgagtttggcttctttctgacatggagaagtgaaggcaaggaaggacaggtgctagaatgctccctcatcaacagtattcggtcgggagccataccaaaggatcccaaaatcttggctgctcttgaagctgttggaaaatcagaaaatgatctggaagggcggatagtttgtgtctgcagtggcacagatctagtgaacattagttttacctacatggtggctgaaaatccagaagtaactaagcaatgggtagaaggcctgagatcaatcatacacaacttcagggccaacaacgtcagtccaatgacatgcctcaagaaacactggatgaaattggcatttatgaccaacacaaatggtaaaattccagttaggagtattactagaacatttgcatcgggaaaaacagaaaaggtgatctttcaagcactcaaggagttaggtcttcccagtggaaagaatgatgaaattgagcccacagcattttcttatgaaaagttctatgaactgacacaaaagatttgtcctcggacagatatagaagatcttttcaaaaaaatcaatggagacaaaactgattatttaacggtagaccaattagtgagctttctaaatgaacatcaacgagatcctcgattgaatgaaattttatttccattttatgatgccaaaagggcaatgcagatcattgagatgtatgaacctgatgaagatttgaagaaaaaaggccttatatcaagtgatgggttttgcagatatctgatgtcagatgaaaacgccccagtcttcctagatcgtttagaactttaccaagaaatggaccatcctctggctcactacttcatcagttcttcccataacacttatctcactggcagacagttcggcgggaagtcttcggtagaaatgtacagacaggttctcctggctggttgcagatgtgttgaacttgactgctgggatggaaaaggtgaagaccaagaaccaataataactcatggaaaagcaatgtgtacagatatcctttttaaggatgtaattcaagccatcaaggaaactgcatttgtcacatcagaatatcctgtaattctctcctttgaaaatcactgcagcaaatatcaacagtacaagatgtccaaatattgcgaagatctatttggggatctcctgttgaaacaagcacttgaatcacatccacttgaaccaggcagggctttgccatcccccaatgacctcaaaagaaaaatactcataaaaaacaagcggctgaaacctgaagttgaaaaaaaacagctggaagctttgagaagcatgatggaagctggagaatctgcctccccagcaaacatcttagaggacgataatgaagaggagatcgaaagtgctgaccaagaggaggaagctcaccccgaattcaaatttggaaatgaactttctgctgatgacttgggtcacaaggaagctgttgcaaatagcgtcaagaagggcctggtcactgtagaagatgagcaggcgtggatggcatcttataaatatgtaggtgctaccactaatatccatccatatttgtccacaatgatcaactacgcccagcctgtaaagtttcaaggtttccatgtggcagaagaacgcaatattcattataacatgtcttcttttaatgaatcagtcggtcttggctacttgaagacacatgcaattgaatttgtcaattataacaaacggcaaatgagtcgcatttaccccaagggaggccgagtcgattccagtaattacatgcctcagattttctggaacgctggctgccagatggtttcactgaactatcaaaccccagatttagcgatgcaattgaatcagggaaaatttgagtataatggatcgtgcgggtaccttctcaaaccagatttcatgaggcggcctgatcgaacatttgaccccttctctgaaactcctgttgatggtgttattgcagccacttgctcagtgcaggttatatcaggtcaattcttatcagataagaaaattggcacctacgtagaggtggatatgtatgggttgcccactgacaccatacgtaaggaattccgaactcgcatggttatgaataatggactcaatccagtttacaatgaagagtcatttgtatttcggaaggtgatcctgccggacctggctgtcttgagaatagctgtgtatgatgataacaacaagctgattggccagaggatcctcccgcttgatggcctccaagccggatatcgacacatttcccttcgaaatgagggaaataaaccattatcactaccaacaattttctgcaatattgttcttaaaacatatgtgcctgatggatttggagatatcgtggatgctttatcagatccaaagaaatttctctcaattacagaaaagagagcagaccaaatgagagctatgggcattgaaactagtgacatagccgacgtgcccagtgacacttccaaaaatgacaagaaaggaaaggccaacaccgccaaagcaaatgtgacccctcagagtagctctgagctcagaccaaccaccacggctgccctggcctctggtgtggaagccaagaaaggtattgaacttatccctcaagtaaggatagaagacttaaagcagatgaaggcttacttgaagcatttaaagaaacagcagaaggagctaaattctttaaagaagaaacatgcaaaggaacacagtaccatgcagaagttacactgcacgcaagttgacaaaattgtggcacagtatgacaaagagaagtcgactcatgagaaaatcctagagaaggcaatgaagaagaaggggggaagtaattgtctcgaaatgaaaaaagaaacagaaatcaaaattcagacgctgacatcagatcacaaatctaaggtcaaagagattgtagcacagcacacaaaggaatggtcagaaatgatcaatacccacagtgctgaggagcaagaaatccgagacctgcacctcagccagcagtgtgagctgctgaaaaagctactcatcaatgcccacgagcagcaaacccagcagctgaaactgtcccatgacagggaaagcaaggaaatgcgagcacaccaggctaagatttctatggaaaatagcaaagccatcagccaagataaatctatcaagaataaagcagaacgggaaaggcgagtcagggagttaaacagcagcaacactaaaaagtttctggaagaaagaaagagacttgccatgaagcagtccaaagaaatggatcagttgaaaaaagtccagcttgaacatctagaattcctagagaaacagaatgagcagcttttgaaatcctgtcatgcagtgtcccaaacgcaaggcgaaggagatgcagcagatggtgaaattggaagccgagatggaccgcagaccagcaacagtagtatgaaactccaaaatgcaaactgaagcagcaaacccacaaagcatcaaaagactcactcacaaacttctgaacacaaactccatggatgaaagctgtttattttgtttcctttatgtgtaaacaagatgatatctgaaaccagagagacttggaatgtctgactgacttctatttaacagcttgagtattgcatttccttggccaaacaaaaatagctacaaatccacaaaaatttactattccagtaaggcagagtccaaccattgataatacaacttaaacatgtttgctataaaataccatcacaagtaaatgagcttggtgtgaacaactctcctttgtgatgccttaggacatgtttgaactgcagcaaaaaacaaaaacaaaaaacagtgcattagcaatttcatagcaagtgcatgcactaggaaaagaaaactctgtctacaagtttattagcagaagtggtggtctgctagacaaataattttgcaaaatttttctacatctaagttacctcatcagtaagtgccatgtctctaccatgccatcagaggctaatttcctgtaaaagttgtggaaattgttagaacaatagaaaaatagagcagtgtatgtgtgccaaaactcatcattactcaaaggagaactgtgttaggcacatttaagaaagtttacatctgacattgctttataggaattgtttctgcagattccggatattataattcacaccataaagattgtgaagtggttattggcaaacgtttgtaaatgtgaccatgtataaagtatttatactctttaattcacactgttagagagcaaaatcatctaagtattgccacatgacaagattagtaaacaggaatactagaactatgtttgcatgatacacaagcaccaataaagactaatccatacacagttaacctaatgccaaataaatactggttaaataaatgtatggcacagaatataatttgactatcaagacttttagcataatgaaaaaccctctctctatatatatatgtgtatatgaattatgtgggcattcttgatacttcaagttctagtttgaaaaaaatacataactaatttaattttacacaaaaatatttatgcagattttcagaatttcatatcaggaaatgacctttttatgtctgttaaatatcaaaacaatttgctacagtgttaatctgcatggtctttaagcctgctgtagttgagttgcagacagtgcatgaaaaagtattccgctgggaattgagccatgccaccaaagccaagaggagcgcatggaaacccggtagtctagaactaatcagattactgattttagggcacagcaccagatgaattgttgtatatgcttgtaaaaattgattctgtgtgttcctctgaacaaagcggagaaaatgatgataccatcaatattgaaattaaacttccaacttctctaataaaaaattaaaacacgcataacactcgtcaagagtatttgctcccaagacacattctagcaaatgttttgcctttttcatatacatgatatcatcgttattttcaaagggggcttattaataccctcagcatgtttttcacccaaatgatgcaaaacatgcagattctagttgacttcagttgtaatagacttgtttttctcctatttatgatttgaagtggattctgtaaaatatctcttgttcttagtttccttatctgtaaaacagtggagttagactacatatcttttggcactaacatctcatgaaaaattatggttaataaaatatcaccacatttggattgccaattttcaaaaaaaaaaaaaaaaaaaaa

SEQ ID NO: 9 - DNA, 3547 bp, homo sapiens
gcactcgcccggctcgcccgctttcgcacccagttcacgcgccacagctatgtgtccccgagccgcgcgggcgcccgcgacgctactcctcgccctgggcgcggtgctgtggcctgcggctggcgcctgggagcttacgattttgcacaccaacgacgtgcacagccggctggagcagaccagcgaggactccagcaagtgcgtcaacgccagccgctgcatgggtggcgtggctcggctcttcaccaaggttcagcagatccgccgcgccgaacccaacgtgctgctgctggacgccggcgaccagtaccagggcactatctggttcaccgtgtacaagggcgccgaggtggcgcacttcatgaacgccctgcgctacgatgccatggcactgggaaatcatgaatttgataatggtgtggaaggactgatcgagccactcctcaaagaggccaaatttccaattctgagtgcaaacattaaagcaaaggggccactagcatctcaaatatcaggactttatttgccatataaagttcttcctgttggtgatgaagttgtgggaatcgttggatacacttccaaagaaaccccttttctctcaaatccagggacaaatttagtgtttgaagatgaaatcactgcattacaacctgaagtagataagttaaaaactctaaatgtgaacaaaattattgcactgggacattcgggttttgaaatggataaactcatcgctcagaaagtgaggggtgtggacgtcgtggtgggaggacactccaacacatttctttacacaggcaatccaccttccaaagaggtgcctgctgggaagtacccattcatagtcacttctgatgatgggcggaaggttcctgtagtccaggcctatgcttttggcaaatacctaggctatctgaagatcgagtttgatgaaagaggaaacgtcatctcttcccatggaaatcccattcttctaaacagcagcattcctgaagatccaagcataaaagcagacattaacaaatggaggataaaattggataattattctacccaggaattagggaaaacaattgtctatctggatggctcctctcaatcatgccgctttagagaatgcaacatgggcaacctgatttgtgatgcaatgattaacaacaacctgagacacacggatgaaatgttctggaaccacgtatccatgtgcattttaaatggaggtggtatccggtcgcccattgatgaacgcaacaatggcacaattacctgggagaacctggctgctgtattgccctttggaggcacatttgacctagtccagttaaaaggttccaccctgaagaaggcctttgagcatagcgtgcaccgctacggccagtccactggagagttcctgcaggtgggcggaatccatgtggtgtatgatctttcccgaaaacctggagacagagtagtcaaattagatgttctttgcaccaagtgtcgagtgcccagttatgaccctctcaaaatggacgaggtatataaggtgatcctcccaaacttcctggccaatggtggagatgggttccagatgataaaagatgaattattaagacatgactctggtgaccaagatatcaacgtggtttctacatatatctccaaaatgaaagtaatttatccagcagttgaaggtcggatcaagttttccacaggaagtcactgccatggaagcttttctttaatatttctttcactttgggcagtgatctttgttttataccaatagccaaaaattctccttgcctttaatgtgtgaaactgcattttttcaagtgagattcaaatctgccttttaggacctggctttgtgacagcaaaaaccatctttacaggctcctagaagctgaaggttagagcattataaaatgaagagacagacatgattactcagggtcagcaacctagtgagttagaaaaaaaattaacatagggccctataaggagaaagccaactatgttaagtttacgtgtccaaattttaatgaaattttactaacaattttaaaccatatttttcttcttcatatccatttctaatccatcaaacagcttatgtttacataaaattttatcattcacaaggaagttttaagcacactgtctcatttgatatccacaacttatttttggtaggaaagagagatgtttttcccacctgtcagatgaaaaaactgaagctcaaaaagggttgacttgaccatacagctaatgctgacagatccaagacctagacctaggtcttttgaactcaagtccagcattctcaactatatcaagttactgttcagaatacttaatatctcctctcttcataattatcaatagccccaagctcatggatgacaaatctctgctttatttcttgtctctattttttcactttatagctcctgttataatagcaagtttaatggtataaacacaggataccatcctctcttgcaacacccatgtgcctttgatgagtcaggtagcaagctgtagtagataatgagaaaggccagaggctgcaaagacagtcaaaggacacgagagaaaggaaggggaagaacaggactccaggactgttttatattatagaaaagcaagagctaaagagcatttacacatgttaaacagatacttgttaagcatagtgcctgacacacggcattagctgttattttatgagattccatcagctctgcctctgtcctctttcttctaacatgaaggtatcatgagaagagaaccttctaacataagctgtaattctaaacctgcacttgtccctctccagcaagaggctagcactgaattcattctactcatactacacacccagttatggaatgtccagagttctcgaagaaaataaatgactttaggaagaggtatacattttttaagtcgctctgcctccaaatctgaacagtcactgtaaatcattcttaagcccagatatgagaacttctgctggaaagtgggaccctctgagtgggtggtcagaaaatacccatgctgatgaaatgacctatgcccaaagaacaaatacttaacgtgggagtggaaccacatgagcctgctcagctctgcataagtaattcaagaaatgggaggcttcaccttaaaaacagtgtgcaaatggcagctagaggttttgataggaagtatgtttgtttcttagtgtttacaaatattaagtactcttgatacaaaatatacttttaaacttcataacctttttataaaagttgttgcagcaaaataatagcctcggttctatgcatatatggattgctataaaaaatgtcaataagattgtacaaggaaaattagagaaagtcacatttagggtttattttttacacttggccagtaaaatagggtaaatcctattagaaattttttaaagaactttttttaagtttcctaaatctgtgtgtgtattgtgaagtggtataagaaatgactttgaaccactttgcaattgtagattcccaacaataaaattgaagat

SEQ ID NO: 10 - DNA, 5745 bp, homo sapiens
cacagggcctgcagagaggggacccaccgggcaggatgcactggcttccagcaggccacgacatcaacggtgccctggagccctccaacatagacaccagcatcctggaggagtacatcagcaaggaggatgcctccgacctctgcttccctgacatctctgctccagccagctcggcctcctactcccacgggcagcctgcgatgcctggctccagcggggtccaccacctgagcccccctgggggtggaccctccccggggcgccatggtcccctcccacccccgggctacggcaccccgctgaactgcaacaacaacaacggcatgggcgctgcccccaagcccttcccggggggcaccgggccccccatcaaggctgagcccaaggctccctatgccccaggcacactgccggactctcccccagactcgggctccgaggcctactccccccagcaggtgaatgagccccacctcctgcgcacgataacccctgagacactgtgccacgtgggagtgccctcccgcctggagcatccgcccccacctccagcccacttgccaggccccccgccacccccaccacccccacctcactaccctgtcctgcagcgggatctgtacatgaaggccgagcccccgatcccccactacgctgccatggggcaggggctggtgcccactgatcttcaccacacccagcagtcccagatgctgcaccagctcctgcagcagcacggagctgagctccctacacacccctccaagaagaggaagcactctgaatcccccccgagcaccctcaatgcccagatgctgaatggaatgatcaaacaggagcctgggaccgtgacagccctgcctctgcaccccactcgagccccatcgccaccctggcctccccagggtccgctctccccgggccctggttccttgcctctcagcattgcccgtgtccagacaccgccttggcacccgccaggtgccccctccccaggcctcctgcaggacagtgacagcctcagtggctcctacctggaccccaactaccagtccatcaagtggcagcctcatcagcagaacaagtgggcgaccctgtacgatgctaactacaaggagctgcccatgctcacctaccgcgtggatgcggacaagggcttcaacttttcggtgggcgacgacgcctttgtgtgccagaagaagaaccacttccaggtgacagtgtacatcggcatgctgggcgagcccaagtacgtcaagacgcccgagggcctcaagcccctcgactgcttctatctgaagctgcacggagtgaagctggaggccctgaaccagtccattaacatcgagcagtcccagtcagaccggagcaagcggcccttcaacccggtcacggtcaatctgccccctgagcaggtcacgaaggtgactgtggggcggctgcacttcagcgagaccaccgctaacaacatgcgtaagaagggcaagcccaacccggaccagaggtacttcatgctggtggtggccctccaggctcatgcacagaaccagaactacacgctggccgcccagatctcagagcgcatcattgtgcgggcctccaacccaggccagttcgagagcgacagcgatgtgttgtggcagcgggcacaggtgcccgacaccgtcttccaccacggccgcgtgggcatcaacacagaccggccggatgaggcgctggttgtgcacgggaatgtcaaggtcatgggctcgcttatgcacccctccgacctgcgcgccaaggaacacgtgcaggaggtggacaccaccgagcaattgaagaggatctcgcgcatgcggctggtgcactacagatacaagcccgagttcgccgccagcgcgggcatcgaggccaccgcgccagagacaggtgtcatcgctcaggaggtgaaggagatcttgcctgaggctgtgaaagacaccggagacatggtctttgccaatgggaaaaccatagagaacttcctggtggtgaacaaggagcgcatcttcatggagaacgtaggggccgtgaaggagctgtgcaagctgacagacaacctggagacgcgcattgatgagctggagcgctggagccacaagctggccaagctgcggcggctcgacagcctcaagtccaccggcagctcgggcgccttcagccatgcagggagccagttcagtcgggcgggcagcgtcccccacaagaagaggccccccaaggtggccagcaagtcatcgtccgtggttccggaccaggcctgcatcagccagcgcttcctgcagggaaccatcattgccctggtggtggtcatggccttcagcgtggtgtccatgtccacactgtacgtgctgagcctgcgcacagaggaggacctggtagacactgatggcaggtccagccagagctttgggaccacgcagctccgacagtcccccttgaccacggggctaccaggcatacagccctctttgctgctggtgaccaccagcctcaccagctcggccccaggttctgctgtccgcaccttggacatgtgttccagccacccctgccctgtcatctgctgttcctcacccactaccaaccctaccactggtcctagtcttggccccagctttaaccctggccatgttctcagcccaagtcccagccccagcaccaaccgctcaggccccagccagatggcccttctgccagtcaccaacatcagagccaagtcctggggtctttcagtcaatggcattggccactccaagcatcacaagagtctggagcctctggccagccctgcagtccccttccctggggggcagggcaaagccaagaacagtcccagccttggtttccatggccgggcccgccgaggggccctccagtccagcgtgggccctgctgagcccacctgggcccagggccagtcagagccagtgccctccctgacctccatccaggtgctggagaattcgatgtccatcacctcccagtactgtgctccaggggatgcctgcaggcctgggaacttcacctaccacatccctgtcagtagtggcaccccactgcacctcagcctgactctgcagatgaactcctcctcccccgtgtctgtggtgctgtgcagcctgaggtcaaaggaggaaccatgtgaggaggggagccttccacagagtctccacacccaccaggacacccagggcacctctcaccggtggccaataaccatcctgtccttccgtgaattcacctaccacttccgggtggcactgctgggtcaggccaactgcagttcagaggctctcgcccagccagccacagactaccacttccacttctaccgcctgtgtgactgagctgccctcctgaggcagcaccacaccagggaccaggggtgcccaggcaccccccaacactggatgcaatggtgttacactggagcccgctgcaggccagctctgctgttcactggccctacccgagactggtgaaactggaagtcttcacactggagttgctgttccagctggtcgcccctcacggcacagagggaacctgagagccagagacttcttgggccttcctgcctgccaccccctaggggccaggacaggaccagtttacctctttccagatatggtggttggagggctggttcaggtgccctggagggaaggggaagcctgtggccctgatttgttcagagcccattctcccttgcctccccttttgagactggagccaacccttttggagagaggacctgcccacctttgagatcagcagggggctcggatccagccctaagagacttgggtggacccccatgagtcaatggagggcagacggctctcccccttaaagctgttccctgggggatggcttggtagtggactttctggggtttgcctgttacgccagactcggacttctaagctttaagtgtggcccaggaggtttcttctccctgggagggcttggctcccaagaagtcccagggcagccgaggccagccctgcctgggttggagaaactgactttgtgccttaagtctactcagtgcctggtgaagccaccctcagcccttcacaggcctgaaccagtaggggccagtgggccaggtaagccctagagccttgaaccaggaatatccaggaagaggaaattccctttgagcccccagatggtattgcagcttcactgcctgcgttcctgggagcgtctggagctcacagtgatcagtgaccacatcattctctctgagcagaggagcaggaatccctcaagcagcagcctggtcttggctggtgggcagatgcaaatagcttttgctgttattaatgaagtaattactaaatgcacttaaaccagggcaggaaggaatggaaggatggagctagaaagctcagagtgggccagagcaggggtgtgacacttgcaaagacagggctctgactctgatccctcccagggagcctccgacacccatcccactcccaaccaccaagaccctgggttagggaagaagttgtatcttaagtgccaccttcaagtttcttagtggtgcctggtgcattccgaggctacatccaggctcatggaaggagtgtagtattcatttagccatgtctgccatgggtccagaaatgggaaagggaattgctgtccttgccctgtggtatgctgccacctctttgggaagcaggccttgcccctgtcccaccactcattctcagctttgaatgggaggcctttctatagtggaggcctttccttgaagcctatgaactgcaggcccccttttgccattgatctcaaagcacttgtcctcaggatagggaagagcagggggatgcaggaatagcagggatagcttgctcccagccccctccccaatttggttccgttgacataggaattttacgattcccaaaccatgcaggggctgagccttccttatgatgactttgttctccctcccactgggggaatcctccctatgccttaaaactgccgagccccactccatgtaataggattcctgggcttcctcaatgggggttcatgttcttggactgcgggccctcagtccttaactggaaagtgaccgtccactgccccatggagcccatctggacacagcacagccccaaaaccgttagcagctggctctgtttccaagcctggggaggggttcctcagtgcaggagttggggacaggctggggatccaagctgcttgagggggtcaaccttggaccaaagttgccttaagcctgtggtaaaagggcttcagggaaggtaagtgggccacctgctggaagctgccagctgcccggctggcaatggtgtgagtgtcttggccctgtccctgccctggggtccagcaggtcatccctcccttcttctctctcctttggcgtttgttcctgtagtcactgggctaatctccccctagcttcaagctgtacatagggcctcccagtgcaaatcctcctgcccataccgtgcacccttagaagcctgcgtgtgcatagagcgccccctacttcccagttaactcccagttcttctccctgagcttggtatttgtcatgtgccaactctgactctgaggtgggcagtgagggaagcagccccgggcctgcttgcttcctgtccccgaaatgttcgtttcttctgaagtaaatatacatatataaataaatgtataaatactgctttgtatctg

SEQ ID NO: 11 - DNA, 1810 bp, homo sapiens
gggatcccgaccagtcctgaccgcacgggggccgcggccacggggcgcaggggccatggtgcgcggcaggatctcccggctctcggtccgggacgtgcgcttccccacgtcgcttgggggccacggcgcggacgccatgcacacggaccctgactactcggctgcctatgtcgtcatagaaactgatgcagaagatggaatcaaggggtgtggaattaccttcactctgggaaaaggcactgaagttgttgtctgtgctgtgaatgccctcgcccaccatgtgctcaacaaggacctcaaggacattgttggtgacttcagaggcttctataggcagctcacaagtgatgggcagctcagatggattggtccagaaaagggcgtggtgcacctggcgacagcggccgtcctaaacgcggtgtgggacttgtgggccaagcaggagggaaagcctgtctggaagttacttgtggacatggatcccaggatgctggtatcctgcatagatttcaggtacatcactgatgtcctgactgaggaggatgccctagaaatactgcagaaaggtcaaattggtaaaaaagaaagagagaagcaaatgctggcacaaggataccctgcttacacgacatcgtgcgcctggctggggtactcagatgacacgttgaagcagctctgtgcccaggcgctgaaggatggctggaccaggtttaaagtaaaggtgggtgctgatctccaggatgacatgcgaagatgccaaatcatccgagacatgattggaccggaaaagactttgatgatggatgccaaccagcgctgggatgtgcctgaggcggtggagtggatgtccaagctggccaagttcaagccattgtggattgaggagccaacctcccctgatgacattctggggcacgccaccatttccaaggcactggtcccattaggaattggcattgccacaggagaacagtgccacaatagagtgatatttaagcaactcctacaggcgaaggccctgcagttcctccagattgacagttgcagactgggcagtgtcaatgagaacctctcagtattgctgatggccaaaaagtttgaaattcctgtttgcccccatgctggtggagttggcctctgtgaactggtgcagcacctgattatatttgactacatatcagtttctgcaagccttgaaaatagggtgtgtgagtatgttgaccacctgcatgagcatttcaagtatcccgtgatgatccagcgggcttcctacatgcctcccaaggatcccggctactcaacagaaatgaaggaggaatctgtaaagaaacaccagtatccagatggtgaagtttggaagaaactccttcctgctcaagaaaattaagtgctcagccccaacaacttttttctttctgaagtgaaagggcttaaaatttcttggaaatagttttacaaaaatggatttaaaaaatcctaccgatcaagatgagttcagctagaagtcataccaccctcaggaatcagctaagtaattattacttgattcttttagcaaatcaatgcacgttatcctacttaatccttaaataagtttagatttaactaacccaaagtccaggaggatgttcttacaaaaatagctatatcaagggctggcacctagacattaaactgtaatttgaaaataagcaacatgttgcataacttgttggaataattccttgttctgtttaacacttgtcataaattagcagaataaaaatagtcgtgcaacaaaaaaaaaaaaaaaaaaaaaaaaaaaaaaaaa

SEQ ID NO: 12 - DNA, 1698 bp, homo sapiens
tcggcacaggagcgaggagacccgagagcagacgcgccctggcgcccgccctgcgcagtcaccatggcgatgcatttcatcttctcagatacagcggtgcttctgtttgatttctggagtgtccacagtcctgctggcatggccctttcggtgttggtgctcctgcttctggctgtactgtatgaaggcatcaaggttggcaaagccaagctgctcaaccaggtactggtgaacctgccaacctccatcagccagcagaccatcgcagagacagacggggactctgcaggctcagattcattccctgttggcagaacccaccacaggtggtacttgtgtcactttggccagtctctaatccatgtcatccaggtggtcatcggctacttcatcatgctggccgtaatgtcctacaacacctggattttccttggtgtggtcttgggctctgctgtgggctactacctagcttacccacttctcagcacagcttagatggtgaggaacgtgcaggcactgaggctggagggacatggagccccctcttccagacactatacttccaactgccctttcttctgatggctattcctccaccttattcccagcccctggaaactttgagctgaagccagcacttgctccctggagttcggaagccattgcagcaaccttccttctcagccagcctacgtagggcccaggcatggtcttgtgtcttaagacagctgctgtgaccaaagggagaatggagataacaggggtggcagggttactgagcccatgacaatgcttctctgtgactcaaaccaggaatttccaaagatttcaagccagggagaagggttcttggtgatgcagggcatggaacctggacaccctcagctctcctgctttgtgccttatctacaggagcatcgcccattggacttcctgacctcttctgtctttgagggacagagaccaagctagatcctttttctcacctttctgcctttggaacacatgaagatcatctcgtctatggatcatgttgacaaactaagttttttttatttttcccattgaactcctagttggcaattttgcacattcatacaaaaaaatttttaatgaaatgatttcattgattcatgatggatggcagaaactgctgagacctatttccctttcttggggagagaataagtgacagctgattaaaggcagagacacaggactgctttcaggctcctggtttattctctgattgactgagctccttccaccagaaggcactgcctgcaggaagaagatgatctgatggccgtgggtgtctgggaagctcttcgtggcctcaatgccctcctttatcctcatctttcttctatgcagaacaaaaagctgcatctaataatgttcaatacttaatattctctatttattacttactgcttactcgtaatgatctagtggggaaacatgattcattcacttaaaatactgattaagccatgggcaggtactgactgaagatgcaatccaaccaaagccattacattttttgagttagatgggactctctggatagttgaacctcttcactttataaaaaaggaaagagagaaaatcactgctgtatactaaatacctcacagattagatgaaaagatggttgtaagctttgggaattaaaaacaaatacattttagtaaatat

SEQ ID NO: 13 - DNA, 417 bp, homo sapiens
acctcccaaccaagccctccagcaaggattcaggagtgcccctcgggcctcgccatgaggctcttcctgtcgctcccggtcctggtggtggttctgtcgatcgtcttggaaggcccagccccagcccaggggaccccagacgtctccagtgccttggataagctgaaggagtttggaaacacactggaggacaaggctcgggaactcatcagccgcatcaaacagagtgaactttctgccaagatgcgggagtggttttcagagacatttcagaaagtgaaggagaaactcaagattgactcatgaggacctgaagggtgacatccaggaggggcctctgaaatttcccacaccccagcgcctgtgctgaggactcccgccatgtggccccaggtgccaccaataaaaatcctaccg

SEQ ID NO: 14 - DNA, 1908 bp, homo sapiens
gggacgtcagcggacggggcgctcgcgggccggggctgtatggggctcccgcgcgggtcgttcttctgggtgctgctcctgctcacggctgcctgctcggggctcctctttgccctgtacttctcggcggtgcagcggtacccggggccagcggccggagccagggacaccacatcatttgaagcattctttcaatccaaggcatcgaattcttggacaggaaagggccaggcctgccgacacctgcttcacctggccattcagcggcacccccacttccgtggcctgttcaatctctccattccagtgctgctgtggggggacctcttcaccccagcgctctgggaccgcctgagccaacacaaagccccgtatggctggcgggggctctctcaccaagtcatcgcctccaccctgagccttctgaacggctcagagagtgccaagctgtttgccccgcccagggacacccctccaaagtgtatccggtgtgccgtggtgggcaacggaggcattctgaatgggtcccgccagggtcccaacatcgatgcccatgactatgtattcagactcaatggagctgtgatcaaaggcttcgagcgcgatgtgggcaccaagacttccttctatggtttcactgtgaacacgatgaagaactccctcgtctcctactggaatctgggcttcacctccgtgccacaaggacaggacctgcagtatatcttcatcccctcagacatccgcgactatgtgatgctgagatcggccattctgggcgtgcctgtccctgagggcctagataaaggggacaggccgcacgcctattttggaccagaagcctctgccagtaaattcaagctgctacatccggacttcatcagctacctgacagaaaggttcttgaaatcaaagttgattaacacacattttggagacctatatatgcctagtaccggggctctcatgctgctgacagctttgcatacctgtgaccaggtcagtgcctatggattcatcacaagcaactactggaaattttccgaccactatttcgaacgaaaaatgaagccattgatattttatgcaaaccacgatctgtccctggaagctgccctgtggagggacctgcacaaggccggcatccttcagctgtaccagcgctgaccccaatgcactgagcgctttgcttcttcaagagttgcggccctgatcctctcaagtggccaaaagcttttttaacttttcaatcttcaccttcccttgccaacagagggcactggggtgaattcaagattttcatcgaggtctgttcaatataggacaccccagcttgtccttggctcatccaagaactcttctgtatctaaaacaatacatctcaatcttggccaagggaaaatggactgctttgctggattggcactgagcaactttaggaaatgtcggtggagtgttcagcaagatcagacagcagtccaggtcaaaggcaaacacacacgctccagcccaaatcctcctggtggcacatcctaccccagatgctaaagtgattcaaggactccaggacacctcttaagagcctttctaagaacatgataggcttacttctgctccataataaagtgggagaaaaaagccagaatataacttaagactagataactgcgtacatgatggaccattttttttttttttggctgggtagagaaatcatataaaacgcaggctgtttagcatggagatgactctcagaacactgggagggtctggcacttgatgggggttagttgcttggcagcctgcctgccactgagggaagtcccattagagatgtatcaccaccttgtcaccaacaggatgatgtcaccaacaggatgatgtcaccaggtaataaaccttcatcctcac

SEQ ID NO: 15 - DNA, 4525 bp, homo sapiens
gcgcggtgccgccgggaaagatggtcgtggcgctgcggtacgtgtggcctctcctcctctgcagcccctgcctgcttatccagatccccgaggaatatgaaggacaccatgtgatggagccacctgtcatcacggaacagtctccacggcgcctggttgtcttccccacagatgacatcagcctcaagtgtgaggccagtggcaagcccgaagtgcagttccgctggacgagggatggtgtccacttcaaacccaaggaagagctgggtgtgaccgtgtaccagtcgccccactctggctccttcaccatcacgggcaacaacagcaactttgctcagaggttccagggcatctaccgctgctttgccagcaataagctgggcaccgccatgtcccatgagatccggctcatggccgagggtgcccccaagtggccaaaggagacagtgaagcccgtggaggtggaggaaggggagtcagtggttctgccttgcaaccctcccccaagtgcagagcctctccggatctactggatgaacagcaagatcttgcacatcaagcaggacgagcgggtgacgatgggccagaacggcaacctctactttgccaatgtgctcacctccgacaaccactcagactacatctgccacgcccacttcccaggcaccaggaccatcattcagaaggaacccattgacctccgggtcaaggccaccaacagcatgattgacaggaagccgcgcctgctcttccccaccaactccagcagccacctggtggccttgcaggggcagccattggtcctggagtgcatcgccgagggctttcccacgcccaccatcaaatggctgcgccccagtggccccatgccagccgaccgtgtcacctaccagaaccacaacaagaccctgcagctgctgaaagtgggcgaggaggatgatggcgagtaccgctgcctggccgagaactcactgggcagtgcccggcatgcgtactatgtcaccgtggaggctgccccgtactggctgcacaagccccagagccatctatatgggccaggagagactgcccgcctggactgccaagtccagggcaggccccaaccagaggtcacctggagaatcaacgggatccctgtggaggagctggccaaagaccagaagtaccggattcagcgtggcgccctgatcctgagcaacgtgcagcccagtgacacaatggtgacccaatgtgaggcccgcaaccggcacgggctcttgctggccaatgcctacatctacgttgtccagctgccagccaagatcctgactgcggacaatcagacgtacatggctgtccagggcagcactgcctaccttctgtgcaaggccttcggagcgcctgtgcccagtgttcagtggctggacgaggatgggacaacagtgcttcaggacgaacgcttcttcccctatgccaatgggaccctgggcattcgagacctccaggccaatgacaccggacgctacttctgcctggctgccaatgaccaaaacaatgttaccatcatggctaacctgaaggttaaagatgcaactcagatcactcaggggccccgcagcacaatcgagaagaaaggttccagggtgaccttcacgtgccaggcctcctttgacccctccttgcagcccagcatcacctggcgtggggacggtcgagacctccaggagcttggggacagtgacaagtacttcatagaggatgggcgcctggtcatccacagcctggactacagcgaccagggcaactacagctgcgtggccagtaccgaactggatgtggtggagagtagggcacagctcttggtggtggggagccctgggccggtgccacggctggtgctgtccgacctgcacctgctgacgcagagccaggtgcgcgtgtcctggagtcctgcagaagaccacaatgcccccattgagaaatatgacattgaatttgaggacaaggaaatggcgcctgaaaaatggtacagtctgggcaaggttccagggaaccagacctctaccaccctcaagctgtcgccctatgtccactacacctttagggttactgccataaacaaatatggccccggggagcccagcccggtctctgagactgtggtcacacctgaggcagccccagagaagaaccctgtggatgtgaagggggaaggaaatgagaccaccaatatggtcatcacgtggaagccgctccggtggatggactggaacgccccccaggttcagtaccgcgtgcagtggcgccctcaggggacacgagggccctggcaggagcagattgtcagcgaccccttcctggtggtgtccaacacgtccaccttcgtgccctatgagatcaaagtccaggccgtcaacagccagggcaagggaccagagccccaggtcactatcggctactctggagaggactacccccaggcaatccctgagctggaaggcattgaaatcctcaactcaagtgccgtgctggtcaagtggcggccggtggacctggcccaggtcaagggccacctccgcggatacaatgtgacgtactggagggagggcagtcagaggaagcacagcaagagacatatccacaaagaccatgtggtggtgcccgccaacaccaccagtgtcatcctcagtggcttgcggccctatagctcctaccacctggaggtgcaggcctttaacgggcgaggatcggggcccgccagcgagttcaccttcagcaccccagagggagtgcctggccaccccgaggcgttgcacctggagtgccagtcgaacaccagcctgctgctgcgctggcagcccccactcagccacaacggcgtgctcaccggctacgtgctctcctaccaccccctggatgaggggggcaaggggcaactgtccttcaaccttcgggaccccgaacttcggacacacaacctgaccgatctcagcccccacctgcggtaccgcttccagcttcaggccaccaccaaagagggccctggtgaagccatcgtacgggaaggaggcactatggccttgtctgggatctcagattttggcaacatctcagccacagcgggtgaaaactacagtgtcgtctcctgggtccccaaggagggccagtgcaacttcaggttccatatcttgttcaaagccttgggagaagagaagggtggggcttccctttcgccacagtatgtcagctacaaccagagctcctacacgcagtgggacctgcagcctgacactgactacgagatccacttgtttaaggagaggatgttccggcaccaaatggctgtgaagaccaatggcacaggccgcgtgaggctccctcctgctggcttcgccactgagggctggttcatcggctttgtgagtgccatcatcctcctgctcctcgtcctgctcatcctctgcttcatcaagcgcagcaagggcggcaaatactcagtgaaggataaggaggacacccaggtggactctgaggcccgaccgatgaaagatgagaccttcggcgagtacaggtccctggagagtgacaacgaggagaaggcctttggcagcagccagccatcgctcaacggggacatcaagcccctgggcagtgacgacagcctggccgattatgggggcagcgtggatgttcagttcaacgaggatggttcgttcattggccagtacagtggcaagaaggagaaggaggcggcagggggcaatgacagctcaggggccacttcccccatcaaccctgccgtggccctagaatagtggagtccaggacaggagatgctgtgcccctggccttgggatccaggcccctccctctccagcaggcccatgggaggctggagttggggcagaggagaacttgctgcctcggatccccttcctaccacccggtccccactttattgccaaaacccagctgcaccccttcctgggcacacgctgctctgccccagcttgggcagatctcccacatgccaggggcctttgggtgctgttttgccagcccatttgggcagagaggctgtggtttgggggagaagaagtaggggtggcccgaaagggtctccgaaatgctgtctttcttgctccctgactgggggcagacatggtggggtctcctcaggaccagggttggcaccttccccctcccccagccactccccagccagcctggctgggactgggaacagaactcggtgtccccaccatctgctgtcttttctttgccatctctgctccaaccgggatgggagccgggcaaactggccgcgggggcaggggaggccatctggagagcccagagtccccccactcccagcatcgcactctggcagcaccgcctcttcccgccgcccagcccaccccatggccggctttcaggagctccatacacacgctgccttcggtacccaccacacaacatccaagtggcctccgtcactacctggctgcggggcgggcacacctcctcccactgcccactggccggc

SEQ ID NO: 16 - DNA, 974 bp, homo sapiens
cctgacatggagcctgccagctccgtcagccctgactcggcccggagctgagctccccacctgccggtagcccaggagatggagcagcccagcccacgtgcccggccttccgcccctgacttcacttgataacaaactagaaactgaaacagggtcgggatgccgatgccggcttggagttagagatgagtcaccgctgagagcagctgcagtagctgagcagtggcagcagagaggcagacgtgagctgagggcgcagaggcaggcagcatctctgagggtccccaaggagcatggctgggagccgtgaggtggtggccatggactgcgagatggtggggctggggccccaccgggagagtggcctggctcgttgcagcctcgtgaacgtccacggtgctgtgctgtacgacaagttcatccggcctgagggagagatcaccgattacagaacccgggtcagcggggtcacccctcagcacatggtgggggccacaccatttgccgtggccaggctagagatcctgcagctcctgaaaggcaagctggtggtgggtcatgacctgaagcacgacttccaggcactgaaagaggacatgagcggctacacaatctacgacacgtccactgacaggctgttgtggcgtgaggccaagctggaccactgcaggcgtgtctccctgcgggtgctgagtgagcgcctcctgcacaagagcatccagaacagcctgcttggacacagctcggtggaagatgcgagggcaacgatggagctctatcaaatctcccagagaatccgagcccgccgagggctgccccgcctggctgtgtcagactgaagccccatccagcccgttccgcagggactagaggctttcggctttttgggacagcaactaccttgcttttggaaaatacatttttaatagtaaagtggctctatattttctctacgcaaaaaaaaaaaaaaaaaa

SEQ ID NO: 17 - DNA, 1669 bp, homo sapiens
aaaaacatgatgagaagtctataaaaattgtgtgctaccaaagatctgtcttatttggcagctgctgcctcacccacagcttttgatatctaggaggactcttctctcccaaactacctgtcaccatggcccaccgatttccagccctcacccaggagcagaagaaggagctctcagaaattgcccagagcattgttgccaatggaaaggggatcctggctgcagatgaatctgtaggtaccatggggaaccgcctgcagaggatcaaggtggaaaacactgaagagaaccgccggcagttccgagaaatcctcttctctgtggacagttccatcaaccagagcatcgggggtgtgatccttttccacgagaccctctaccagaaggacagccagggaaagctgttcagaaacatcctcaaggaaaaggggatcgtggtgggaatcaagttagaccaaggaggtgctcctcttgcaggaacaaacaaagaaaccaccattcaagggcttgatggcctctcagagcgctgtgctcagtacaagaaagatggtgttgactttgggaagtggcgtgctgtgctgaggattgccgaccagtgtccatccagcctcgctatccaggaaaacgccaacgccctggctcgctacgccagcatctgtcagcagaatggactggtacctattgttgaaccagaggtaattcctgatggagaccatgacctggaacactgccagtatgttactgagaaggtcctggctgctgtctacaaggccctgaatgaccatcatgtttacctggagggcaccctgctaaagcccaacatggtgactgctggacatgcctgcaccaagaagtatactccagaacaagtagctatggccaccgtaacagctctccaccgtactgttcctgcagctgttcctggcatctgctttttgtctggtggcatgagtgaagaggatgccactctcaacctcaatgctatcaacctttgccctctaccaaagccctggaaactaagtttctcttatggacgggccctgcaggccagtgcactggctgcctggggtggcaaggctgcaaacaaggaggcaacccaggaggcttttatgaagcgggccatggctaactgccaggcggccaaaggacagtatgttcacacgggttcttctggggctgcttccacccagtcgctcttcacagcctgctatacctactagggtccaatgcccgccagcctagctccagtgcttctagtaggagggctgaaagggagcaacttttcctccaatcctggaaattcgacacaattagatttgaactgctggaaatacaacacatgttaaatcttaagtacaagggggaaaaaataaatcagttattgaaacataaaaatgaataccaaggacctgatcaaatttcacacagcagtttccttgcaacactttcagctccccatgctccagaatacccacccaagaaaataataggctttaaaacaatatcggctcctcatccaaagaacaactgctgattgaaacacctcattagctgagtgtagagaagtgcatcttatgaaacagtcttagcagtggtaggttgggaaggagatagctgcaaccaaaaaagaaataaatattctataaaccttcaaaaaaaaaaaaaaaaa

SEQ ID NO: 18 - DNA, 6914 bp, homo sapiens
tcattgcagctgggacagcccggagtgtggttagcagctcggcaagcgctgcccaggtcctggggtggtggcagccagcgggagcaggaaaggaagcatgttcccaggctgcccacgcctctgggtcctggtggtcttgggcaccagctgggtaggctgggggagccaagggacagaagcggcacagctaaggcagttctacgtggctgctcagggcatcagttggagctaccgacctgagcccacaaactcaagtttgaatctttctgtaacttcctttaagaaaattgtctacagagagtatgaaccatattttaagaaagaaaaaccacaatctaccatttcaggacttcttgggcctactttatatgctgaagtcggagacatcataaaagttcactttaaaaataaggcagataagcccttgagcatccatcctcaaggaattaggtacagtaaattatcagaaggtgcttcttaccttgaccacacattccctgcagagaagatggacgacgctgtggctccaggccgagaatacacctatgaatggagtatcagtgaggacagtggacccacccatgatgaccctccatgcctcacacacatctattactcccatgaaaatctgatcgaggatttcaactctgggctgattgggcccctgcttatctgtaaaaaagggaccctaactgagggtgggacacagaagacgtttgacaagcaaatcgtgctactatttgctgtgtttgatgaaagcaagagctggagccagtcatcatccctaatgtacacagtcaatggatatgtgaatgggacaatgccagatataacagtttgtgcccatgaccacatcagctggcatctgctgggaatgagctcggggccagaattattctccattcatttcaacggccaggtcctggagcagaaccatcataaggtctcagccatcacccttgtcagtgctacatccactaccgcaaatatgactgtgggcccagagggaaagtggatcatatcttctctcaccccaaaacatttgcaagctgggatgcaggcttacattgacattaaaaactgcccaaagaaaaccaggaatcttaagaaaataactcgtgagcagaggcggcacatgaagaggtgggaatacttcattgctgcagaggaagtcatttgggactatgcacctgtaataccagcgaatatggacaaaaaatacaggtctcagcatttggataatttctcaaaccaaattggaaaacattataagaaagttatgtacacacagtacgaagatgagtccttcaccaaacatacagtgaatcccaatatgaaagaagatgggattttgggtcctattatcagagcccaggtcagagacacactcaaaatcgtgttcaaaaatatggccagccgcccctatagcatttaccctcatggagtgaccttctcgccttatgaagatgaagtcaactcttctttcacctcaggcaggaacaacaccatgatcagagcagttcaaccaggggaaacctatacttataagtggaacatcttagagtttgatgaacccacagaaaatgatgcccagtgcttaacaagaccatactacagtgacgtggacatcatgagagacatcgcctctgggctaataggactacttctaatctgtaagagcagatccctggacaggcgaggaatacagagggcagcagacatcgaacagcaggctgtgtttgctgtgtttgatgagaacaaaagctggtaccttgaggacaacatcaacaagttttgtgaaaatcctgatgaggtgaaacgtgatgaccccaagttttatgaatcaaacatcatgagcactatcaatggctatgtgcctgagagcataactactcttggattctgctttgatgacactgtccagtggcacttctgtagtgtggggacccagaatgaaattttgaccatccacttcactgggcactcattcatctatggaaagaggcatgaggacaccttgaccctcttccccatgcgtggagaatctgtgacggtcacaatggataatgttggaacttggatgttaacttccatgaattctagtccaagaagcaaaaagctgaggctgaaattcagggatgttaaatgtatcccagatgatgatgaagactcatatgagatttttgaacctccagaatctacagtcatggctacacggaaaatgcatgatcgtttagaacctgaagatgaagagagtgatgctgactatgattaccagaacagactggctgcagcattaggaattaggtcattccgaaactcatcattgaaccaggaagaagaagagttcaatcttactgccctagctctggagaatggcactgaattcgtttcttcgaacacagatataattgttggttcaaattattcttccccaagtaatattagtaagttcactgtcaataaccttgcagaacctcagaaagccccttctcaccaacaagccaccacagctggttccccactgagacacctcattggcaagaactcagttctcaattcttccacagcagagcattccagcccatattctgaagaccctatagaggatcctctacagccagatgtcacagggatacgtctactttcacttggtgctggagaattcagaagtcaagaacatgctaagcgtaagggacccaaggtagaaagagatcaagcagcaaagcacaggttctcctggatgaaattactagcacataaagttgggagacacctaagccaagacactggttctccttccggaatgaggccctgggaggaccttcctagccaagacactggttctccttccagaatgaggccctgggaggaccctcctagtgatctgttactcttaaaacaaagtaactcatctaagattttggttgggagatggcatttggcttctgagaaaggtagctatgaaataatccaagatactgatgaagacacagctgttaacaattggctgatcagcccccagaatgcctcacgtgcttggggagaaagcacccctcttgccaacaagcctggaaagcagagtggccacccaaagtttcctagagttagacataaatctctacaagtaagacaggatggaggaaagagtagactgaagaaaagccagtttctcattaagacacgaaaaaagaaaaaagagaagcacacacaccatgctcctttatctccgaggacctttcaccctctaagaagtgaagcctacaacacattttcagaaagaagacttaagcattcgttggtgcttcataaatccaatgaaacatctcttcccacagacctcaatcagacattgccctctatggattttggctggatagcctcacttcctgaccataatcagaattcctcaaatgacactggtcaggcaagctgtcctccaggtctttatcagacagtgcccccagaggaacactatcaaacattccccattcaagaccctgatcaaatgcactctacttcagaccccagtcacagatcctcttctccagagctcagtgaaatgcttgagtatgaccgaagtcacaagtccttccccacagatataagtcaaatgtccccttcctcagaacatgaagtctggcagacagtcatctctccagacctcagccaggtgaccctctctccagaactcagccagacaaacctctctccagacctcagccacacgactctctctccagaactcattcagagaaacctttccccagccctcggtcagatgcccatttctccagacctcagccatacaaccctttctccagacctcagccatacaaccctttctttagacctcagccagacaaacctctctccagaactcagtcagacaaacctttctccagccctcggtcagatgcccctttctccagacctcagccatacaaccatttctctagacttcagccagacaaacctctctccagaactcagccatatgactctctctccagaactcagtcagacaaacctttccccagccctcggtcagatgcccatttctccagacctcagccatacaaccctttctctagacttcagccagacaaacctctctccagaactcagtcaaacaaacctttccccagccctcggtcagatgcccctttctccagaccccagccatacaaccctttctctagacctcagccagacaaacctctctccagaactcagtcagacaaacctttccccagacctcagtgagatgcccctctttgcagatctcagtcaaattccccttaccccagacctcgaccagatgacactttctccagaccttggtgagacagatctttccccaaactttggtcagatgtccctttccccagacctcagccaggtgactctctctccagacatcagtgacaccacccttctcccggatctcagccagatatcacctcctccagaccttgatcagatattctacccttctgaatctagtcagtcattgcttcttcaagaatttaatgagtcttttccttatccagaccttggtcagatgccatctccttcatctcctactctcaatgatacttttctatcaaaggaatttaatccactggttatagtgggcctcagtaaagatggtacagattacattgagatcattccaaaggaagaggtccagagcagtgaagatgactatgctgaaattgattatgtgccctatgatgacccctacaaaactgatgttaggacaaacatcaactcctccagagatcctgacaacattgcagcatggtacctccgcagcaacaatggaaacagaagaaattattacattgctgctgaagaaatatcctgggattattcagaatttgtacaaagggaaacagatattgaagactctgatgatattccagaagataccacatataagaaagtagtttttcgaaagtacctcgacagcacttttaccaaacgtgatcctcgaggggagtatgaagagcatctcggaattcttggtcctattatcagagctgaagtggatgatgttatccaagttcgttttaaaaatttagcatccagaccgtattctctacatgcccatggactttcctatgaaaaatcatcagagggaaagacttatgaagatgactctcctgaatggtttaaggaagataatgctgttcagccaaatagcagttatacctacgtatggcatgccactgagcgatcagggccagaaagtcctggctctgcctgtcgggcttgggcctactactcagctgtgaacccagaaaaagatattcactcaggcttgataggtcccctcctaatctgccaaaaaggaatactacataaggacagcaacatgcctgtggacatgagagaatttgtcttactatttatgacctttgatgaaaagaagagctggtactatgaaaagaagtcccgaagttcttggagactcacatcctcagaaatgaaaaaatcccatgagtttcacgccattaatgggatgatctacagcttgcctggcctgaaaatgtatgagcaagagtgggtgaggttacacctgctgaacataggcggctcccaagacattcacgtggttcactttcacggccagaccttgctggaaaatggcaataaacagcaccagttaggggtctggccccttctgcctggttcatttaaaactcttgaaatgaaggcatcaaaacctggctggtggctcctaaacacagaggttggagaaaaccagagagcagggatgcaaacgccatttcttatcatggacagagactgtaggatgccaatgggactaagcactggtatcatatctgattcacagatcaaggcttcagagtttctgggttactgggagcccagattagcaagattaaacaatggtggatcttataatgcttggagtgtagaaaaacttgcagcagaatttgcctctaaaccttggatccaggtggacatgcaaaaggaagtcataatcacagggatccagacccaaggtgccaaacactacctgaagtcctgctataccacagagttctatgtagcttacagttccaaccagatcaactggcagatcttcaaagggaacagcacaaggaatgtgatgtattttaatggcaattcagatgcctctacaataaaagagaatcagtttgacccacctattgtggctagatatattaggatctctccaactcgagcctataacagacctacccttcgattggaactgcaaggttgtgaggtaaatggatgttccacacccctgggtatggaaaatggaaagatagaaaacaagcaaatcacagcttcttcgtttaagaaatcttggtggggagattactgggaacccttccgtgcccgtctgaatgcccagggacgtgtgaatgcctggcaagccaaggcaaacaacaataagcagtggctagaaattgatctactcaagatcaagaagataacggcaattataacacagggctgcaagtctctgtcctctgaaatgtatgtaaagagctataccatccactacagtgagcagggagtggaatggaaaccatacaggctgaaatcctccatggtggacaagatttttgaaggaaatactaataccaaaggacatgtgaagaactttttcaaccccccaatcatttccaggtttatccgtgtcattcctaaaacatggaatcaaagtattgcacttcgcctggaactctttggctgtgatatttactagaattgaacattcaaaaacccctggaagagactctttaagacctcaaaccatttagaatgggcaatgtattttacgctgtgttaaatgttaacagttttccactatttctctttcttttctattagtgaataaaattttatac

SEQ ID NO: 19 - DNA, 1801 bp, homo sapiens
tttaataataattctgtgttgcttctgagattaataattgattaattcatagtcaggaatctttgtaaaaaggaaaccaattacttttggctaccacttttacatggtcacctacaggagagaggaggtgctgcaagactctctggtagaaaaatgaagagggtcctggtactactgcttgctgtggcatttggacatgctttagagagaggccgggattatgaaaagaataaagtctgcaaggaattctcccatctgggaaaggaggacttcacatctctgtcactagtcctgtacagtagaaaatttcccagtggcacgtttgaacaggtcagccaacttgtgaaggaagttgtctccttgaccgaagcctgctgtgcggaaggggctgaccctgactgctatgacaccaggacctcagcactgtctgccaagtcctgtgaaagtaattctccattccccgttcacccaggcactgctgagtgctgcaccaaagagggcctggaacgaaagctctgcatggctgctctgaaacaccagccacaggaattccctacctacgtggaacccacaaatgatgaaatctgtgaggcgttcaggaaagatccaaaggaatatgctaatcaatttatgtgggaatattccactaattacggacaagctcctctgtcacttttagtcagttacaccaagagttatctttctatggtagggtcctgctgtacctctgcaagcccaactgtatgctttttgaaagagagactccagcttaaacatttatcacttctcaccactctgtcaaatagagtctgctcacaatatgctgcttatggggagaagaaatcaaggctcagcaatctcataaagttagcccaaaaagtgcctactgctgatctggaggatgttttgccactagctgaagatattactaacatcctctccaaatgctgtgagtctgcctctgaagattgcatggccaaagagctgcctgaacacacagtaaaactctgtgacaatttatccacaaagaattctaagtttgaagactgttgtcaagaaaaaacagccatggacgtttttgtgtgcacttacttcatgccagctgcccaactccccgagcttccagatgtagagttgcccacaaacaaagatgtgtgtgatccaggaaacaccaaagtcatggataagtatacatttgaactaagcagaaggactcatcttccggaagtattcctcagtaaggtacttgagccaaccctaaaaagccttggtgaatgctgtgatgttgaagactcaactacctgttttaatgctaagggccctctactaaagaaggaactatcttctttcattgacaagggacaagaactatgtgcagattattcagaaaatacatttactgagtacaagaaaaaactggcagagcgactaaaagcaaaattgcctgatgccacacccacggaactggcaaagctggttaacaagcactcagactttgcctccaactgctgttccataaactcacctcctctttactgtgattcagagattgatgctgaattgaagaatatcctgtagtcctgaagcatgtttattaactttgaccagagttggagccacccaggggaatgatctctgatgacctaacctaagcaaaaccactgagcttctgggaagacaactaggatactttctactttttctagctacaatatcttcatacaatgacaagtatgatgatttgctatcaaaataaattgaaatataatgcaaaccataaaaaaaaaaaaaaaaaaaaaaa

SEQ ID NO: 20 - DNA, 1918 bp, homo sapiens
aagtctacatgaaaaggatggtttcttggagcttccacaaacttaaaaccatgaaacatctattattgctactattgtgtgtttttctagttaagtcccaaggtgtcaacgacaatgaggagggtttcttcagtgcccgtggtcatcgaccccttgacaagaagagagaagaggctcccagcctgaggcctgccccaccgcccatcagtggaggtggctatcgggctcgtccagccaaagcagctgccactcaaaagaaagtagaaagaaaagcccctgatgctggaggctgtcttcacgctgacccagacctgggggtgttgtgtcctacaggatgtcagttgcaagaggctttgctacaacaggaaaggccaatcagaaatagtgttgatgagttaaataacaatgtggaagctgtttcccagacctcctcttcttcctttcagtacatgtatttgctgaaagacctgtggcaaaagaggcagaagcaagtaaaagataatgaaaatgtagtcaatgagtactcctcagaactggaaaagcaccaattatatatagatgagactgtgaatagcaatatcgcaactaaccttcgtgtgcttcgttcaatcctagaaaacctgagaagcaaaatacaaaagttagaatctgatgtctcagctcaaatggaatattgtcgcaccccatgcactgtcagttgcaatattcctgtggtgtctggcaaagaatgtgaggaaattatcaggaaaggaggtgaaacatctgaaatgtatctcattcaacctgacagttctgtcaaaccgtatagagtatactgtgacatgaatacagaaaatggaggatggacagtgattcagaaccgtcaagacggtagtgttgactttggcaggaaatgggatccatataaacagggatttggaaatgttgcaaccaacacagatgggaagaattactgtggcctaccaggtgaatattggcttggaaatgataaaattagccagcttaccaggatgggacccacagaacttttgatagaaatggaggactggaaaggagacaaagtaaaggctcactatggaggattcactgtacagaatgaagccaacaaataccagatctcagtgaacaaatacagaggaacagccggtaatgccctcatggatggagcatctcagctgatgggagaaaacaggaccatgaccattcacaacggcatgttcttcagcacgtatgacagagacaatgacggctggttaacatcagatcccagaaaacagtgttctaaagaagacggtggtggatggtggtataatagatgtcatgcagccaatccaaacggcagatactactggggtggacagtacacctgggacatggcaaagcatggcacagatgatggtgtagtatggatgaattggaaggggtcatggtactcaatgaggaagatgagtatgaagatcaggcccttcttcccacagcaatagtccccaatacgtagatttttgctcttctgtatgtgacaacatttttgtacattatgttattggaattttctttcatacattatattcctctaaaactctcaagcagacgtgagtgtgactttttgaaaaaagtataggataaattacattaaaatagcacatgattttcttttgttttcttcatttctcttgctcaccaagaagtaacaaaagtatagttttgacagagttggtgttcataatttcagttctagttgattgcgagaattttcaaataaggaagaggggtcttttatccttgtcgtaggaaaaccatgacggaaaggaaaaactgatgtttaaaagtccacttttaaaactatatttatttatgtaggatctgtcaaagaaaacttccaaaaagatttattaattaaaccagactctgttgcaat

SEQ ID NO: 21 - DNA, 2038 bp, homo sapiens
cgaagggctcgaagatggccggttggcagagctacgtggataacctgatgtgcgatggctgctgccaggaggccgccattgtcggctactgcgacgccaaatacgtctgggcagccacggccgggggcgtctttcagagcattacgccaatagaaatagatatgattgtaggaaaagaccgggaaggtttctttaccaacggtttgactcttggcgcgaagaaatgctcagtgatcagagatagtctatacgtcgatggtgactgcacaatggacatccggacaaagagtcaaggtggggagccaacatacaatgtggctgtcggcagagctggtagagtcttggtctttgtaatgggaaaagaaggggtccatggaggcggattgaataagaaggcatactcaatggcaaaatacttgagagactctgggttctagctgctaggcagactgttaagtattaggggaaaattgctcttaaactttcctagctataagcttaagtcttaattctggaaattttattagcaatgcagggtgatggggtatgaacctgtgtctcctttgtatccctctgttggtggggaaaggtgtctttctttctgccctccccccccaaaataattctgttcacttttgttttgtttccttgtgtactccagcattggttatagtcatgggaaaggaaggtgtccacggaggcacacttaacaagaaagcatatgaactcgctttatacctgaggaggtctgatgtgtaagcagcctctccccatctacctagcaactgtcttcatcaacaaccctaattatggtcacaatgctaccaaactgtagatggtagctaatttttctttacctattttctaatgtcatgattcctgtttgcccaatggatcatttgtatgttaaccactgtatgtaaccaacccttatctggcaacataattgcagcacaataatgatttgcatgataccttgaaattggggggagggggcatgccaagttgggcatcactttgtcttagcaattaatgggatattgattactaaaataagttaatattaagcaaggtgccggttgtacaatctctgatcagtgtcttttcagcactttgagcatttacttggctcatttagtcttccttttgtagcgcatggttgggaggaaaaagtgcatgcatcattccttcactcttctctttttcccgcccccccctcccttcgcacataggcatttggtttgcttccatctttttttatgcagtgcctgtttttttttaaccaattaaaatcccttttgttgatgagctattgagagctgcagtagtttgcttttagtattgttgttgcacttgagcagagacaaacctttattcatagtgtctacaggacatatgaagagtgcaatggcaaaacaagagcaaaaagcacttcctcccatgaccttacagtaaccatactgattgaatccccagggacattccatcattgcaatagctcagatttttcttcctttttctttgcacaccagctctactctttagtaaaattgtaaaaggctgccattatggacattaggtatcccaacataaccatctggagtgtgtccagtttgttcttcataggaccaatttttatttgcagcttgagtttttatatgaagttgcattattgtggacttggctgtcttgtgatgaatttttttcatatgtattctgtgccatactattgttaaaatgaactgttgctattgtgagatggattttaactgacctattaagggtttctttcgaatggcactactttagggacattctagtatttgcttctattgtttgggccttgtggataatgtacagatttaaaaacaaatcttgttgctgatttgtccatttctttccctgcactttgttacatctgggatacagtctaactcatctgatttaatatgcatttaaaaaaatgccataactattaaacaccttgtttacagacagatgaaataaatttattccaaccaaaaaaaaaaaaaaaaaa

SEQ ID NO: 22 - DNA, 803 bp, homo sapiens
gcccatagtttattataaaggtgactgcaccctgcagccaccagcactgcctggctccacgtgcctcctggtctcagtatggcgctgtcctgggttcttacagtcctgagcctcctacctctgctggaagcccagatcccattgtgtgccaacctagtaccggtgcccatcaccaacgccaccctggaccagatcactggcaagtggttttatatcgcatcggcctttcgaaacgaggagtacaataagtcggttcaggagatccaagcaaccttcttttacttcacccccaacaagacagaggacacgatctttctcagagagtaccagacccgacaggaccagtgcatctataacaccacctacctgaatgtccagcgggaaaatgggaccatctccagatacgtgggaggccaagagcatttcgctcacttgctgatcctcagggacaccaagacctacatgcttgcttttgacgtgaacgatgagaagaactgggggctgtctgtctatgctgacaagccagagacgaccaaggagcaactgggagagttctacgaagctctcgactgcttgcgcattcccaagtcagatgtcgtgtacaccgattggaaaaaggataagtgtgagccactggagaagcagcacgagaaggagaggaaacaggaggagggggaatcctagcaggacacagccttggatcaggacagagacttggggccatcctgcccctccaacccgacatgtgtacctcagctttttccctcacttgcatcaataaagcttctgtgtttggaacagct

SEQ ID NO: 23 - DNA, 14121 bp, homo sapiens
attcccaccgggacctgcggggctgagtgcccttctcggttgctgccgctgaggagcccgcccagccagccagggccgcgaggccgaggccaggccgcagcccaggagccgccccaccgcagctggcgatggacccgccgaggcccgcgctgctggcgctgctggcgctgcctgcgctgctgctgctgctgctggcgggcgccagggccgaagaggaaatgctggaaaatgtcagcctggtctgtccaaaagatgcgacccgattcaagcacctccggaagtacacatacaactatgaggctgagagttccagtggagtccctgggactgctgattcaagaagtgccaccaggatcaactgcaaggttgagctggaggttccccagctctgcagcttcatcctgaagaccagccagtgcaccctgaaagaggtgtatggcttcaaccctgagggcaaagccttgctgaagaaaaccaagaactctgaggagtttgctgcagccatgtccaggtatgagctcaagctggccattccagaagggaagcaggttttcctttacccggagaaagatgaacctacttacatcctgaacatcaagaggggcatcatttctgccctcctggttcccccagagacagaagaagccaagcaagtgttgtttctggataccgtgtatggaaactgctccactcactttaccgtcaagacgaggaagggcaatgtggcaacagaaatatccactgaaagagacctggggcagtgtgatcgcttcaagcccatccgcacaggcatcagcccacttgctctcatcaaaggcatgacccgccccttgtcaactctgatcagcagcagccagtcctgtcagtacacactggacgctaagaggaagcatgtggcagaagccatctgcaaggagcaacacctcttcctgcctttctcctacaacaataagtatgggatggtagcacaagtgacacagactttgaaacttgaagacacaccaaagatcaacagccgcttctttggtgaaggtactaagaagatgggcctcgcatttgagagcaccaaatccacatcacctccaaagcaggccgaagctgttttgaagactctccaggaactgaaaaaactaaccatctctgagcaaaatatccagagagctaatctcttcaataagctggttactgagctgagaggcctcagtgatgaagcagtcacatctctcttgccacagctgattgaggtgtccagccccatcactttacaagccttggttcagtgtggacagcctcagtgctccactcacatcctccagtggctgaaacgtgtgcatgccaacccccttctgatagatgtggtcacctacctggtggccctgatccccgagccctcagcacagcagctgcgagagatcttcaacatggcgagggatcagcgcagccgagccaccttgtatgcgctgagccacgcggtcaacaactatcataagacaaaccctacagggacccaggagctgctggacattgctaattacctgatggaacagattcaagatgactgcactggggatgaagattacacctatttgattctgcgggtcattggaaatatgggccaaaccatggagcagttaactccagaactcaagtcttcaatcctcaaatgtgtccaaagtacaaagccatcactgatgatccagaaagctgccatccaggctctgcggaaaatggagcctaaagacaaggaccaggaggttcttcttcagactttccttgatgatgcttctccgggagataagcgactggctgcctatcttatgttgatgaggagtccttcacaggcagatattaacaaaattgtccaaattctaccatgggaacagaatgagcaagtgaagaactttgtggcttcccatattgccaatatcttgaactcagaagaattggatatccaagatctgaaaaagttagtgaaagaagctctgaaagaatctcaacttccaactgtcatggacttcagaaaattctctcggaactatcaactctacaaatctgtttctcttccatcacttgacccagcctcagccaaaatagaagggaatcttatatttgatccaaataactaccttcctaaagaaagcatgctgaaaactaccctcactgcctttggatttgcttcagctgacctcatcgagattggcttggaaggaaaaggctttgagccaacattggaagctctttttgggaagcaaggatttttcccagacagtgtcaacaaagctttgtactgggttaatggtcaagttcctgatggtgtctctaaggtcttagtggaccactttggctataccaaagatgataaacatgagcaggatatggtaaatggaataatgctcagtgttgagaagctgattaaagatttgaaatccaaagaagtcccggaagccagagcctacctccgcatcttgggagaggagcttggttttgccagtctccatgacctccagctcctgggaaagctgcttctgatgggtgcccgcactctgcaggggatcccccagatgattggagaggtcatcaggaagggctcaaagaatgacttttttcttcactacatcttcatggagaatgcctttgaactccccactggagctggattacagttgcaaatatcttcatctggagtcattgctcccggagccaaggctggagtaaaactggaagtagccaacatgcaggctgaactggtggcaaaaccctccgtgtctgtggagtttgtgacaaatatgggcatcatcattccggacttcgctaggagtggggtccagatgaacaccaacttcttccacgagtcgggtctggaggctcatgttgccctaaaagctgggaagctgaagtttatcattccttccccaaagagaccagtcaagctgctcagtggaggcaacacattacatttggtctctaccaccaaaacggaggtgatcccacctctcattgagaacaggcagtcctggtcagtttgcaagcaagtctttcctggcctgaattactgcacctcaggcgcttactccaacgccagctccacagactccgcctcctactatccgctgaccggggacaccagattagagctggaactgaggcctacaggagagattgagcagtattctgtcagcgcaacctatgagctccagagagaggacagagccttggtggataccctgaagtttgtaactcaagcagaaggtgcgaagcagactgaggctaccatgacattcaaatataatcggcagagtatgaccttgtccagtgaagtccaaattccggattttgatgttgacctcggaacaatcctcagagttaatgatgaatctactgagggcaaaacgtcttacagactcaccctggacattcagaacaagaaaattactgaggtcgccctcatgggccacctaagttgtgacacaaaggaagaaagaaaaatcaagggtgttatttccataccccgtttgcaagcagaagccagaagtgagatcctcgcccactggtcgcctgccaaactgcttctccaaatggactcatctgctacagcttatggctccacagtttccaagagggtggcatggcattatgatgaagagaagattgaatttgaatggaacacaggcaccaatgtagataccaaaaaaatgacttccaatttccctgtggatctctccgattatcctaagagcttgcatatgtatgctaatagactcctggatcacagagtccctgaaacagacatgactttccggcacgtgggttccaaattaatagttgcaatgagctcatggcttcagaaggcatctgggagtcttccttatacccagactttgcaagaccacctcaatagcctgaaggagttcaacctccagaacatgggattgccagacttccacatcccagaaaacctcttcttaaaaagcgatggccgggtcaaatataccttgaacaagaacagtttgaaaattgagattcctttgccttttggtggcaaatcctccagagatctaaagatgttagagactgttaggacaccagccctccacttcaagtctgtgggattccatctgccatctcgagagttccaagtccctacttttaccattcccaagttgtatcaactgcaagtgcctctcctgggtgttctagacctctccacgaatgtctacagcaacttgtacaactggtccgcctcctacagtggtggcaacaccagcacagaccatttcagccttcgggctcgttaccacatgaaggctgactctgtggttgacctgctttcctacaatgtgcaaggatctggagaaacaacatatgaccacaagaatacgttcacactatcatgtgatgggtctctacgccacaaatttctagattcgaatatcaaattcagtcatgtagaaaaacttggaaacaacccagtctcaaaaggtttactaatattcgatgcatctagttcctggggaccacagatgtctgcttcagttcatttggactccaaaaagaaacagcatttgtttgtcaaagaagtcaagattgatgggcagttcagagtctcttcgttctatgctaaaggcacatatggcctgtcttgtcagagggatcctaacactggccggctcaatggagagtccaacctgaggtttaactcctcctacctccaaggcaccaaccagataacaggaagatatgaagatggaaccctctccctcacctccacctctgatctgcaaagtggcatcattaaaaatactgcttccctaaagtatgagaactacgagctgactttaaaatctgacaccaatgggaagtataagaactttgccacttctaacaagatggatatgaccttctctaagcaaaatgcactgctgcgttctgaatatcaggctgattacgagtcattgaggttcttcagcctgctttctggatcactaaattcccatggtcttgagttaaatgctgacatcttaggcactgacaaaattaatagtggtgctcacaaggcgacactaaggattggccaagatggaatatctaccagtgcaacgaccaacttgaagtgtagtctcctggtgctggagaatgagctgaatgcagagcttggcctctctggggcatctatgaaattaacaacaaatggccgcttcagggaacacaatgcaaaattcagtctggatgggaaagccgccctcacagagctatcactgggaagtgcttatcaggccatgattctgggtgtcgacagcaaaaacattttcaacttcaaggtcagtcaagaaggacttaagctctcaaatgacatgatgggctcatatgctgaaatgaaatttgaccacacaaacagtctgaacattgcaggcttatcactggacttctcttcaaaacttgacaacatttacagctctgacaagttttataagcaaactgttaatttacagctacagccctattctctggtaactactttaaacagtgacctgaaatacaatgctctggatctcaccaacaatgggaaactacggctagaacccctgaagctgcatgtggctggtaacctaaaaggagcctaccaaaataatgaaataaaacacatctatgccatctcttctgctgccttatcagcaagctataaagcagacactgttgctaaggttcagggtgtggagtttagccatcggctcaacacagacatcgctgggctggcttcagccattgacatgagcacaaactataattcagactcactgcatttcagcaatgtcttccgttctgtaatggccccgtttaccatgaccatcgatgcacatacaaatggcaatgggaaactcgctctctggggagaacatactgggcagctgtatagcaaattcctgttgaaagcagaacctctggcatttactttctctcatgattacaaaggctccacaagtcatcatctcgtgtctaggaaaagcatcagtgcagctcttgaacacaaagtcagtgccctgcttactccagctgagcagacaggcacctggaaactcaagacccaatttaacaacaatgaatacagccaggacttggatgcttacaacactaaagataaaattggcgtggagcttactggacgaactctggctgacctaactctactagactccccaattaaagtgccacttttactcagtgagcccatcaatatcattgatgctttagagatgagagatgccgttgagaagccccaagaatttacaattgttgcttttgtaaagtatgataaaaaccaagatgttcactccattaacctcccattttttgagaccttgcaagaatattttgagaggaatcgacaaaccattatagttgtagtggaaaacgtacagagaaacctgaagcacatcaatattgatcaatttgtaagaaaatacagagcagccctgggaaaactcccacagcaagctaatgattatctgaattcattcaattgggagagacaagtttcacatgccaaggagaaactgactgctctcacaaaaaagtatagaattacagaaaatgatatacaaattgcattagatgatgccaaaatcaactttaatgaaaaactatctcaactgcagacatatatgatacaatttgatcagtatattaaagatagttatgatttacatgatttgaaaatagctattgctaatattattgatgaaatcattgaaaaattaaaaagtcttgatgagcactatcatatccgtgtaaatttagtaaaaacaatccatgatctacatttgtttattgaaaatattgattttaacaaaagtggaagtagtactgcatcctggattcaaaatgtggatactaagtaccaaatcagaatccagatacaagaaaaactgcagcagcttaagagacacatacagaatatagacatccagcacctagctggaaagttaaaacaacacattgaggctattgatgttagagtgcttttagatcaattgggaactacaatttcatttgaaagaataaatgatgttcttgagcatgtcaaacactttgttataaatcttattggggattttgaagtagctgagaaaatcaatgccttcagagccaaagtccatgagttaatcgagaggtatgaagtagaccaacaaatccaggttttaatggataaattagtagagttgacccaccaatacaagttgaaggagactattcagaagctaagcaatgtcctacaacaagttaagataaaagattactttgagaaattggttggatttattgatgatgctgtgaagaagcttaatgaattatcttttaaaacattcattgaagatgttaacaaattccttgacatgttgataaagaaattaaagtcatttgattaccaccagtttgtagatgaaaccaatgacaaaatccgtgaggtgactcagagactcaatggtgaaattcaggctctggaactaccacaaaaagctgaagcattaaaactgtttttagaggaaaccaaggccacagttgcagtgtatctggaaagcctacaggacaccaaaataaccttaatcatcaattggttacaggaggctttaagttcagcatctttggctcacatgaaggccaaattccgagagactctagaagatacacgagaccgaatgtatcaaatggacattcagcaggaacttcaacgatacctgtctctggtaggccaggtttatagcacacttgtcacctacatttctgattggtggactcttgctgctaagaaccttactgactttgcagagcaatattctatccaagattgggctaaacgtatgaaagcattggtagagcaagggttcactgttcctgaaatcaagaccatccttgggaccatgcctgcctttgaagtcagtcttcaggctcttcagaaagctaccttccagacacctgattttatagtccccctaacagatttgaggattccatcagttcagataaacttcaaagacttaaaaaatataaaaatcccatccaggttttccacaccagaatttaccatccttaacaccttccacattccttcctttacaattgactttgtcgaaatgaaagtaaagatcatcagaaccattgaccagatgcagaacagtgagctgcagtggcccgttccagatatatatctcagggatctgaaggtggaggacattcctctagcgagaatcaccctgccagacttccgtttaccagaaatcgcaattccagaattcataatcccaactctcaaccttaatgattttcaagttcctgaccttcacataccagaattccagcttccccacatctcacacacaattgaagtacctacttttggcaagctatacagtattctgaaaatccaatctcctcttttcacattagatgcaaatgctgacatagggaatggaaccacctcagcaaacgaagcaggtatcgcagcttccatcactgccaaaggagagtccaaattagaagttctcaattttgattttcaagcaaatgcacaactctcaaaccctaagattaatccgctggctctgaaggagtcagtgaagttctccagcaagtacctgagaacggagcatgggagtgaaatgctgttttttggaaatgctattgagggaaaatcaaacacagtggcaagtttacacacagaaaaaaatacactggagcttagtaatggagtgattgtcaagataaacaatcagcttaccctggatagcaacactaaatacttccacaaattgaacatccccaaactggacttctctagtcaggctgacctgcgcaacgagatcaagacactgttgaaagctggccacatagcatggacttcttctggaaaagggtcatggaaatgggcctgccccagattctcagatgagggaacacatgaatcacaaattagtttcaccatagaaggacccctcacttcctttggactgtccaataagatcaatagcaaacacctaagagtaaaccaaaacttggtttatgaatctggctccctcaacttttctaaacttgaaattcaatcacaagtcgattcccagcatgtgggccacagtgttctaactgctaaaggcatggcactgtttggagaagggaaggcagagtttactgggaggcatgatgctcatttaaatggaaaggttattggaactttgaaaaattctcttttcttttcagcccagccatttgagatcacggcatccacaaacaatgaagggaatttgaaagttcgttttccattaaggttaacagggaagatagacttcctgaataactatgcactgtttctgagtcccagtgcccagcaagcaagttggcaagtaagtgctaggttcaatcagtataagtacaaccaaaatttctctgctggaaacaacgagaacattatggaggcccatgtaggaataaatggagaagcaaatctggatttcttaaacattcctttaacaattcctgaaatgcgtctaccttacacaataatcacaactcctccactgaaagatttctctctatgggaaaaaacaggcttgaaggaattcttgaaaacgacaaagcaatcatttgatttaagtgtaaaagctcagtataagaaaaacaaacacaggcattccatcacaaatcctttggctgtgctttgtgagtttatcagtcagagcatcaaatcctttgacaggcattttgaaaaaaacagaaacaatgcattagattttgtcaccaaatcctataatgaaacaaaaattaagtttgataagtacaaagctgaaaaatctcacgacgagctccccaggacctttcaaattcctggatacactgttccagttgtcaatgttgaagtgtctccattcaccatagagatgtcggcattcggctatgtgttcccaaaagcagtcagcatgcctagtttctccatcctaggttctgacgtccgtgtgccttcatacacattaatcctgccatcattagagctgccagtccttcatgtccctagaaatctcaagctttctcttccacatttcaaggaattgtgtaccataagccatatttttattcctgccatgggcaatattacctatgatttctcctttaaatcaagtgtcatcacactgaataccaatgctgaactttttaaccagtcagatattgttgctcatctcctttcttcatcttcatctgtcattgatgcactgcagtacaaattagagggcaccacaagattgacaagaaaaaggggattgaagttagccacagctctgtctctgagcaacaaatttgtggagggtagtcataacagtactgtgagcttaaccacgaaaaatatggaagtgtcagtggcaaaaaccacaaaagccgaaattccaattttgagaatgaatttcaagcaagaacttaatggaaataccaagtcaaaacctactgtctcttcctccatggaatttaagtatgatttcaattcttcaatgctgtactctaccgctaaaggagcagttgaccacaagcttagcttggaaagcctcacctcttacttttccattgagtcatctaccaaaggagatgtcaagggttcggttctttctcgggaatattcaggaactattgctagtgaggccaacacttacttgaattccaagagcacacggtcttcagtgaagctgcagggcacttccaaaattgatgatatctggaaccttgaagtaaaagaaaattttgctggagaagccacactccaacgcatatattccctctgggagcacagtacgaaaaaccacttacagctagagggcctctttttcaccaacggagaacatacaagcaaagccaccctggaactctctccatggcaaatgtcagctcttgttcaggtccatgcaagtcagcccagttccttccatgatttccctgaccttggccaggaagtggccctgaatgctaacactaagaaccagaagatcagatggaaaaatgaagtccggattcattctgggtctttccagagccaggtcgagctttccaatgaccaagaaaaggcacaccttgacattgcaggatccttagaaggacacctaaggttcctcaaaaatatcatcctaccagtctatgacaagagcttatgggatttcctaaagctggatgtaaccaccagcattggtaggagacagcatcttcgtgtttcaactgcctttgtgtacaccaaaaaccccaatggctattcattctccatccctgtaaaagttttggctgataaattcattactcctgggctgaaactaaatgatctaaattcagttcttgtcatgcctacgttccatgtcccatttacagatcttcaggttccatcgtgcaaacttgacttcagagaaatacaaatctataagaagctgagaacttcatcatttgccctcaacctaccaacactccccgaggtaaaattccctgaagttgatgtgttaacaaaatattctcaaccagaagactccttgattcccttttttgagataaccgtgcctgaatctcagttaactgtgtcccagttcacgcttccaaaaagtgtttcagatggcattgctgctttggatctaaatgcagtagccaacaagatcgcagactttgagttgcccaccatcatcgtgcctgagcagaccattgagattccctccattaagttctctgtacctgctggaattgtcattccttcctttcaagcactgactgcacgctttgaggtagactctcccgtgtataatgccacttggagtgccagtttgaaaaacaaagcagattatgttgaaacagtcctggattccacatgcagctcaaccgtacagttcctagaatatgaactaaatgttttgggaacacacaaaatcgaagatggtacgttagcctctaagactaaaggaacacttgcacaccgtgacttcagtgcagaatatgaagaagatggcaaatttgaaggacttcaggaatgggaaggaaaagcgcacctcaatatcaaaagcccagcgttcaccgatctccatctgcgctaccagaaagacaagaaaggcatctccacctcagcagcctccccagccgtaggcaccgtgggcatggatatggatgaagatgacgacttttctaaatggaacttctactacagccctcagtcctctccagataaaaaactcaccatattcaaaactgagttgagggtccgggaatctgatgaggaaactcagatcaaagttaattgggaagaagaggcagcttctggcttgctaacctctctgaaagacaacgtgcccaaggccacaggggtcctttatgattatgtcaacaagtaccactgggaacacacagggctcaccctgagagaagtgtcttcaaagctgagaagaaatctgcagaacaatgctgagtgggtttatcaaggggccattaggcaaattgatgatatcgacgtgaggttccagaaagcagccagtggcaccactgggacctaccaagagtggaaggacaaggcccagaatctgtaccaggaactgttgactcaggaaggccaagccagtttccagggactcaaggataacgtgtttgatggcttggtacgagttactcaaaaattccatatgaaagtcaagcatctgattgactcactcattgattttctgaacttccccagattccagtttccggggaaacctgggatatacactagggaggaactttgcactatgttcataagggaggtagggacggtactgtcccaggtatattcgaaagtccataatggttcagaaatactgttttcctatttccaagacctagtgattacacttcctttcgagttaaggaaacataaactaatagatgtaatctcgatgtatagggaactgttgaaagatttatcaaaagaagcccaagaggtatttaaagccattcagtctctcaagaccacagaggtgctacgtaatcttcaggaccttttacaattcattttccaactaatagaagataacattaaacagctgaaagagatgaaatttacttatcttattaattatatccaagatgagatcaacacaatcttcaatgattatatcccatatgtttttaaattgttgaaagaaaacctatgccttaatcttcataagttcaatgaatttattcaaaacgagcttcaggaagcttctcaagagttacagcagatccatcaatacattatggcccttcgtgaagaatattttgatccaagtatagttggctggacagtgaaatattatgaacttgaagaaaagatagtcagtctgatcaagaacctgttagttgctcttaaggacttccattctgaatatattgtcagtgcctctaactttacttcccaactctcaagtcaagttgagcaatttctgcacagaaatattcaggaatatcttagcatccttaccgatccagatggaaaagggaaagagaagattgcagagctttctgccactgctcaggaaataattaaaagccaggccattgcgacgaagaaaataatttctgattaccaccagcagtttagatataaactgcaagatttttcagaccaactctctgattactatgaaaaatttattgctgaatccaaaagattgattgacctgtccattcaaaactaccacacatttctgatatacatcacggagttactgaaaaagctgcaatcaaccacagtcatgaacccctacatgaagcttgctccaggagaacttactatcatcctctaattttttaaaagaaatcttcatttattcttcttttccaattgaactttcacatagcacagaaaaaattcaaactgcctatattgataaaaccatacagtgagccagccttgcagtaggcagtagactataagcagaagcacatatgaactggacctgcaccaaagctggcaccagggctcggaaggtctctgaactcagaaggatggcattttttgcaagttaaagaaaatcaggatctgagttattttgctaaacttgggggaggaggaacaaataaatggagtctttattgtgtatcata

SEQ ID NO: 24 - DNA, 2534 bp, homo sapiens
gcactcgggcgcagccgggtggatctcgagcaggtgtgagcagcctatcagtcaccatgtccgcagcctggatcccggctctcggcctcggtgtgtgtctgctgctgctgccggggcccgcgggcagcgagggagccgctcccattgctatcacatgttttaccagaggcttggacatcaggaaagagaaagcagatgtcctctgcccagggggctgccctcttgaggaattctctgtgtatgggaacatagtatatgcttctgtatcgagcatatgtggggctgctgtccacaggggagtaatcagcaactcagggggacctgtacgagtctatagcctacctggtcgagaaaactattcctcagtagatgccaatggcatccagtctcaaatgctttctagatggtctgcttctttcacagtaactaaaggcaaaagtagtacacaggaggccacaggacaagcagtgtccacagcacatccaccaacaggtaaacgactaaagaaaacacccgagaagaaaactggcaataaagattgtaaagcagacattgcatttctgattgatggaagctttaatattgggcagcgccgatttaatttacagaagaattttgttggaaaagtggctctaatgttgggaattggaacagaaggaccacatgtgggccttgttcaagccagtgaacatcccaaaatagaattttacttgaaaaactttacatcagccaaagatgttttgtttgccataaaggaagtaggtttcagagggggtaattccaatacaggaaaagccttgaagcatactgctcagaaattcttcacggtagatgctggagtaagaaaagggatccccaaagtggtggtggtatttattgatggttggccttctgatgacatcgaggaagcaggcattgtggccagagagtttggtgtcaatgtatttatagtttctgtggccaagcctatccctgaagaactggggatggttcaggatgtcacatttgttgacaaggctgtctgtcggaataatggcttcttctcttaccacatgcccaactggtttggcaccacaaaatacgtaaagcctctggtacagaagctgtgcactcatgaacaaatgatgtgcagcaagacctgttataactcagtgaacattgcctttctaattgatggctccagcagtgttggagatagcaatttccgcctcatgcttgaatttgtttccaacatagccaagacttttgaaatctcggacattggtgccaagatagctgctgtacagtttacttatgatcagcgcacggagttcagtttcactgactatagcaccaaagagaatgtcctagctgtcatcagaaacatccgctatatgagtggtggaacagctactggtgatgccatttccttcactgttagaaatgtgtttggccctataagggagagccccaacaagaacttcctagtaattgtcacagatgggcagtcctatgatgatgtccaaggccctgcagctgctgcacatgatgcaggaatcactatcttctctgttggtgtggcttgggcacctctggatgacctgaaagatatggcttctaaaccgaaggagtctcatgctttcttcacaagagagttcacaggattagaaccaattgtttctgatgtcatcagaggcatttgtagagatttcttagaatcccagcaataatggtaacattttgacaactgaaagaaaaagtacaaggggatccagtgtgtaaattgtattctcataatactgaaatgctttagcatactagaatcagatacaaaactattaagtatgtcaacagccatttaggcaaataagcactcctttaaagccgctgccttctggttacaatttacagtgtactttgttaaaaacactgctgaggcttcataatcatggctcttagaaactcaggaaagaggagataatgtggattaaaaccttaagagttctaaccatgcctactaaatgtacagatatgcaaattccatagctcaataaaagaatctgatacttagaccaaaagcaacattcgttctctaaccattctgtattgattatataagcaaaatgaaaagagaaacttaaatgaacacagctctttaacatggttcaggtacacatattttgacccaagtggatattttcttaaaaccaatcaataatagctagctattactgcagactataaaatctggatatagaaaggagacctgtatcaaactgcttttgtagtgtgttttcataacaacttatgactaaaaatatcacactgaataagagagcaggattgccaggtatttttctatttctctccttaattttatatgtatatagatatatttggcttatattctaagtcacctaagtacttaaaagttaagttggtaaagtatttactgactgcttataaacatttaaagacaaagacatttcaaataactgcagaaaaaatattgtagtttgaatatttaagcaataaaactgctagtgagttattgt

SEQ ID NO: 25 - DNA, 2806 bp, homo sapiens
ccgggacccgcccgcccgcgggagaaatgttgctgaagtgctgctgaaagggccagagatgcaaggatttgggatacattttgaacctttaagctgtctgacattgacctcctttcattattaataaagaagaatcaggagcttaggatgtattaacaccaactcattaatatactaaccggacaatgttctacaaacaattctacattgtaaaggactggattggcacaaaataaaataattttattttattcagcttataatatgactcgatggaggaaaatttgataagcatgagagaagaccattcttttcatgttcgttacagaatggaagcttcttgcctagagctggccttggaaggggaacgtctatgtaaatcaggagactgccgcgctggcgtgtcattctttgaagctgcagttcaagttggaactgaagacctaaaaacacttagcgctatttacagccagttgggcaatgcttatttctatttgcatgattatgccaaagcattagaatatcaccatcatgatttaacccttgcaaggactattggagaccagctgggggaagcgaaagctagtggtaatctgggaaacaccttaaaagttcttgggaattttgacgaagccatagtttgttgtcagcgacacctagatatttccagagagcttaatgacaaggtgggagaagcaagagcactttacaatcttgggaatgtgtatcatgccaaagggaaaagttttggttgccctggtccccaggatgtaggagaatttccagaagaagtgagagatgctctgcaggcagccgtggatttttatgaggaaaacctatcattagtgactgctttgggtgaccgagcggcacaaggacgtgcctttggaaatcttggaaacacacattacctccttggcaacttcagggatgcagttatagctcatgagcagcgtctccttattgcaaaagaatttggagataaagcagctgaaagaagagcatatagcaaccttggaaatgcatatatatttcttggtgaatttgaaactgcctcggaatactacaagaagacactactgttggcccgacagcttaaagaccgagctgtagaagcacagtcttgttacagtcttggaaatacatatactttacttcaagactatgaaaaggccattgattatcatctgaagcacttagcaattgctcaagagctgaatgatagaattggtgaaggaagagcatgttggagcttaggaaatgcatacacagcactaggaaatcatgatcaagcaatgcattttgctgaaaagcacttggaaatttcaagagaggttggggataaaagtggtgaactaacagcacgacttaatctctcagaccttcaaatggttcttggtctgagctacagcacaaataactccataatgtctgaaaatactgaaattgatagcagtttgaatggtgtacgccccaagttgggacgccggcatagtatggaaaatatggaacttatgaagttaacaccagaaaaggtacagaactggaacagtgaaattcttgctaagcaaaaacctcttattgccaaaccttctgcaaagctactctttgtcaacagactgaaggggaaaaaatacaaaacgaattcctccactaaagttctccaagatgccagtaattctattgaccaccgaattccaaattctcagaggaaaatcagtgcagatactattggagatgaagggttctttgacttattaagccgatttcaaagcaataggatggatgatcagagatgttgcttacaagaaaagaactgccatacagcttcaacaacaacttcttccactccccctaaaatgatgctaaaaacatcatctgttcctgtggtatcccccaacacggatgagtttttagatcttcttgccagctcacagagtcgccgtctggatgaccagagggctagtttcagtaatttgccagggcttcgtctaacacaaaacagccagtcggtacttagccacctgatgactaatgacaacaaagaggctgatgaagatttctttgacatccttgtaaaatgtcaaggatccagattagatgatcaaagatgtgctccaccacctgctaccacaaagggtccgacagtaccagatgaagactttttcagccttattttacggtcccagggaaagagaatggatgaacagagagttcttttacaaagagatcaaaacagagacactgactttgggctaaaggactttttgcaaaataatgctttgttggagtttaaaaattcagggaaaaaatcggcagaccattagttactatggatttattttttttcctttcaaacacggtaaggaaacaatctattacttttttccttaaaaggagaatttatagcactgtaatacagcttaaaatatttttagaatgatgtaaatagttaaccttcagtagtctattaaggcattaatacttctctggacatgcgcgtttgagggtggaggggtcctgtaaggtgcttcatcgtctgtgattactgcttgggatgtgttctttggcagcttgtgagattactttacctagtgtttataaagtaggaagttaagtgaatcatagattagaatttaatactcttatggaaataattttttaacatcttaattgacaatggcgttttttttatacataaccatggatgtagtgggaaacaatgttgtttggtaaaaataatgtacttgatcaatgtaaaaaagtatataaaatagtcttactaaaaaaaaaaaaaaaaaaaaaa

SEQ ID NO: 26 - DNA, 1413 bp, homo sapiens
ccggcctcttggtactgctgaccccagccaggctacagggatcgattggagctgtccttggggctgtaattggccccagctgagcagggcaaacactgaggtcaactacaagccacaggccccttccccagcctcagttcacagctgccctgttgcagggaggcggtggcccttctgttgctagaccgagcctgtgggatataccaaggcagaggagcccatagccatgaggagcctcggggccctgctcttgctgctgagcgcctgcctggcggtgagcgctggccctgtgccaacgccgcccgacaacatccaagtgcaggaaaacttcaatatctctcggatctatgggaagtggtacaacctggccatcggttccacctgcccctggctgaagaagatcatggacaggatgacagtgagcacgctggtgctgggagagggcgctacagaggcggagatcagcatgaccagcactcgttggcggaaaggtgtctgtgaggagacgtctggagcttatgagaaaacagatactgatgggaagtttctctatcacaaatccaaatggaacataaccatggagtcctatgtggtccacaccaactatgatgagtatgccattttcctgaccaagaaattcagccgccatcatggacccaccattactgccaagctctacgggcgggcgccgcagctgagggaaactctcctgcaggacttcagagtggttgcccagggtgtgggcatccctgaggactccatcttcaccatggctgaccgaggtgaatgtgtccctggggagcaggaaccagagcccatcttaatcccgagagtccggagggctgtgctaccccaagaagaggaaggatcagggggtgggcaactggtaactgaagtcaccaagaaagaagattcctgccagctgggctactcggccggtccctgcatgggaatgaccagcaggtatttctataatggtacatccatggcctgtgagactttccagtacggcggctgcatgggcaacggtaacaacttcgtcacagaaaaggagtgtctgcagacctgccgaactgtggcggcctgcaatctccccatagtccggggcccctgccgagccttcatccagctctgggcatttgatgctgtcaaggggaagtgcgtcctcttcccctacgggggctgccagggcaacgggaacaagttctactcagagaaggagtgcagagagtactgcggtgtccctggtgatggtgatgaggagctgctgcgcttctccaactgacaactggccggtctgcaagtcagaggatggccagtgtctgtcccggggtcctgtggcaggcagcgccaagcaacctgggtccaaataaaaactaaattgtaaactcctgaaaaaaaaaaaaaaaaaaa

SEQ ID NO: 27 - DNA, 1298 bp, homo sapiens
cattaatatctggcaggggctctcaaatgtgccatagcaagctacttgattacacgtatgttatttagttaaatttgtgaaaattatgagatgctcaccaacccggtgataaacttgctccctcgccattggctggcctggtcacatggctgcccaactttattcagttgacagcaagtaggagggccctatggaaggagaaaaaaagacaacacgagaaaaattagtattttctaccttctgaaattaatggtcatgagttcgtatatggtgaactccaagtatgtggaccccaagttccctccgtgcgaggagtatttgcagggcggctacctaggcgagcagggcgccgactactacggcggcggcgcgcagggcgcagacttccagcccccggggctctacccacggcccgacttcggtgagcagcctttcggaggcagcggccccgggcctggctcggcgctgcctgcgcggggtcacggacaagagccaggcggccccggcggtcactacgccgctccaggagagccttgcccagctcccccggcgcctccgccggcgcccctgcctggcgcccgggcctacagtcagtccgaccccaagcagccgccctccgggacggcactcaagcagccggccgtggtctacccctggatgaagaaggtgcacgtgaattcggtgaaccccaactacaccggtggggaacccaagcggtcccgaacggcctacacccggcagcaagtcctagaactggaaaaagaatttcattttaacaggtatctgacaaggcgccgtcggattgaaatcgctcacaccctgtgtctgtcggagcgccagatcaagatctggttccagaaccggaggatgaagtggaaaaaagatcataagctgcccaacactaaaggcaggtcatcgtcctcatcttcctcctcatcttgctcctcctcagtcgcccccagccagcatttacagccgatggccaaagaccaccacacggacctgacgaccttatagaagtggggaccctgggcccatctctccctgcgcaccaggctgagccgaagctgcgggggcaggccgggcctgctgtcacctcgctgggctctaaggtactgtggggtggacctgggacaagcaggccgccctcggactaggttagcatcctgcccgagggcagccccctccctagagcgggatggggatgggagggggggcgggattctctctctaagtatattatatggcaggagctactgagaacataaaatcttggcgagtcattaaacttatgaaaa

SEQ ID NO: 28 - DNA, 2089 bp, homo sapiens
gcggccgctccgtgtgccctggactcgccgcccgcggctcggaagctggagagtcagcgacggggcccgactgcgggaccgagggctgcaagaagaagcgaacaaatagtccccagcgcctcctctggatgcggtcgcgtctgtggtcctggcagccgctgggcgggccaggccaggtcgggccgggccgagccgggcacatggacctgggcctgcgggctctaattgcggcgcttatgttgatgattttttttttaatcacagcagcccccagtttagcggactgatttactcccggtattggtaaatatgatcacgtgggccgcgcgaccaatggtggaggctgcagcctgcgaactagtcggtggctcgggcgccggcggggagctgctcggcggcggacagtgtaatgttgggtgggagtgcgggacgcctcaaaatgtcttccagtggcaccctcagcaactactacgtggactcgcttataggccatgagggcgacgaggtgttcgcggcgcgcttcgggccgccggggccaggcgcgcagggccggcctgcaggtgtggctgatggcccggccgccaccgccgccgagttcgcctcgtgtagttttgcccccagatcggccgtgttctctgcctcgtggtccgcggtgccctcccagcccccggcagcggcggcgatgagcggcctctaccacccgtacgttcccccgccgcccctggccgcctctgcctccgagcccggccgctacgtgcgctcctggatggagccgctgcccggcttcccgggcggtgcgggcggtggcggtggtggtggaggcggcggtccgggccgcggtcccagccctggccccagcggcccagccaacgggcgccactacgggattaagcctgaaacccgagcggccccggcccccgccacggccgcctccaccacctcctcctcctccacttccttatcctcctcctccaaacggactgagtgctccgtggcccgggagtcccaggggagcagcggccccgagttctcgtgcaactcgttcctgcaggagaaggcggcagcggcgacggggggaaccgggcctggggcagggatcggggccgcgactgggacgggcggctcgtcggagccctcagcttgcagcgaccacccgatcccaggctgttcgctgaaggaggaggagaagcagcattcgcagccgcagcagcagcaacttgacccaaacaaccccgccgcgaactggatccacgctcgctccacccggaaaaagcgctgtccctacaccaaataccagacgcttgagctggagaaagaattcctcttcaacatgtacctcacccgggaccggcgctacgaggtggccaggattctcaacctaacagagagacaggtcaaaatctggtttcagaaccgtaggatgaaaatgaaaaagatgagcaaggagaaatgccccaaaggagactgacccggcgcggtgctggcgggagcgctcaagggcagcggatttgttgttgttgctgttttcctttgtgggtgtttggtgcttgatttccagaaactctccagcgacttggacttcttcttctttttttttttctttttagatagaagtgactgtgtggttggtctctgaggtatttgggggactctgtatttgctcgtttacgtgttggaaaaaccaagtggctttggggtttcgccctatcccactccctctctttcctgctccattggttccttaagaaatgctatattttgtgagtgcaagctggcttggggagccctctcttgtgtaaatgtcccccatgtttctgaaaagtgctgtagtttagtcccctcacccccagcactgcccaaacaggggccaagtgcgccccaattccaagaatgaaggcagagcgacaacagtgcggacaccccggctgctagcccacggtgaagcccggcggggttgcccaccagttgcgaaagccccctttcctcagggagcacgcgggacctcggtggagatctccagtgaggcttagaggagcccagggcctcgggcgggttggggtttgtcctcagtgcattggacgcgctgctc

SEQ ID NO: 29 - DNA, 2182 bp, homo sapiens
gtctaggagccagccccacccttagaaaagatgttttccatgaggatcgtctgcctagttctaagtgtggtgggcacagcatggactgcagatagtggtgaaggtgactttctagctgaaggaggaggcgtgcgtggcccaagggttgtggaaagacatcaatctgcctgcaaagattcagactggcccttctgctctgatgaagactggaactacaaatgcccttctggctgcaggatgaaagggttgattgatgaagtcaatcaagattttacaaacagaataaataagctcaaaaattcactatttgaatatcagaagaacaataaggattctcattcgttgaccactaatataatggaaattttgagaggcgatttttcctcagccaataaccgtgataatacctacaaccgagtgtcagaggatctgagaagcagaattgaagtcctgaagcgcaaagtcatagaaaaagtacagcatatccagcttctgcagaaaaatgttagagctcagttggttgatatgaaacgactggaggtggacattgatattaagatccgatcttgtcgagggtcatgcagtagggctttagctcgtgaagtagatctgaaggactatgaagatcagcagaagcaacttgaacaggtcattgccaaagacttacttccctctagagataggcaacacttaccactgataaaaatgaaaccagttccagacttggttcccggaaattttaagagccagcttcagaaggtacccccagagtggaaggcattaacagacatgccgcagatgagaatggagttagagagacctggtggaaatgagattactcgaggaggctccacctcttatggaaccggatcagagacggaaagccccaggaaccctagcagtgctggaagctggaactctgggagctctggacctggaagtactggaaaccgaaaccctgggagctctgggactggagggactgcaacctggaaacctgggagctctggacctggaagtactggaagctggaactctgggagctctggaactggaagtactggaaaccaaaaccctgggagccctagacctggtagtaccggaacctggaatcctggcagctctgaacgcggaagtgctgggcactggacctctgagagctctgtatctggtagtactggacaatggcactctgaatctggaagttttaggccagatagcccaggctctgggaacgcgaggcctaacaacccagactggggcacatttgaagaggtgtcaggaaatgtaagtccagggacaaggagagagtaccacacagaaaaactggtcacttctaaaggagataaagagctcaggactggtaaagagaaggtcacctctggtagcacaaccaccacgcgtcgttcatgctctaaaaccgttactaagactgttattggtcctgatggtcacaaagaagttaccaaagaagtggtgacctccgaagatggttctgactgtcccgaggcaatggatttaggcacattgtctggcataggtactctggatgggttccgccataggcaccctgatgaagctgccttcttcgacactgcctcaactggaaaaacattcccaggtttcttctcacctatgttaggagagtttgtcagtgagactgagtctaggggctcagaatctggcatcttcacaaatacaaaggaatccagttctcatcaccctgggatagctgaattcccttcccgtggtaaatcttcaagttacagcaaacaatttactagtagcacgagttacaacagaggagactccacatttgaaagcaagagctataaaatggcagatgaggccggaagtgaagccgatcatgaaggaacacatagcaccaagagaggccatgctaaatctcgccctgtcagaggtatccacacttctcctttggggaagccttccctgtccccctagactaagttaaatatttctgcacagtgttcccatggccccttgcatttccttcttaactctctgttacacgtcattgaaactacacttttttggtctgtttttgtgctagactgtaagttccttgggggcagggcctttgtctgtctcatctctgtattcccaaatgcctaacagtacagagccatgactcaataaatacatgttaaatggatgaatg

SEQ ID NO: 30 - DNA, 1997 bp, homo sapiens
aattcctcagtgacccaggagctgacacactatggcgcacgtccgaggcttgcagctgcctggctgcctggccctggctgccctgtgtagccttgtgcacagccagcatgtgttcctggctcctcagcaagcacggtcgctgctccagcgggtccggcgagccaacaccttcttggaggaggtgcgcaagggcaacctagagcgagagtgcgtggaggagacgtgcagctacgaggaggccttcgaggctctggagtcctccacggctacggatgtgttctgggccaagtacacagcttgtgagacagcgaggacgcctcgagataagcttgctgcatgtctggaaggtaactgtgctgagggtctgggtacgaactaccgagggcatgtgaacatcacccggtcaggcattgagtgccagctatggaggagtcgctacccacataagcctgaaatcaactccactacccatcctggggccgacctacaggagaatttctgccgcaaccccgacagcagcaccacgggaccctggtgctacactacagaccccaccgtgaggaggcaggaatgcagcatccctgtctgtggccaggatcaagtcactgtagcgatgactccacgctccgaaggctccagtgtgaatctgtcacctccattggagcagtgtgtccctgatcgggggcagcagtaccaggggcgcctggcggtgaccacacatgggctcccctgcctggcctgggccagcgcacaggccaaggccctgagcaagcaccaggacttcaactcagctgtgcagctggtggagaacttctgccgcaacccagacggggatgaggagggcgtgtggtgctatgtggccgggaagcctggcgactttgggtactgcgacctcaactattgtgaggaggccgtggaggaggagacaggagatgggctggatgaggactcagacagggccatcgaagggcgtaccgccaccagtgagtaccagactttcttcaatccgaggacctttggctcgggagaggcagactgtgggctgcgacctctgttcgagaagaagtcgctggaggacaaaaccgaaagagagctcctggaatcctacatcgacgggcgcattgtggagggctcggatgcagagatcggcatgtcaccttggcaggtgatgcttttccggaagagtccccaggagctgctgtgtggggccagcctcatcagtgaccgctgggtcctcaccgccgcccactgcctcctgtacccgccctgggacaagaacttcaccgagaatgaccttctggtgcgcattggcaagcactcccgcacaaggtacgagcgaaacattgaaaagatatccatgttggaaaagatctacatccaccccaggtacaactggcgggagaacctggaccgggacattgccctgatgaagctgaagaagcctgttgccttcagtgactacattcaccctgtgtgtctgcccgacagggagacggcagccagcttgctccaggctggatacaaggggcgggtgacaggctggggcaacctgaaggagacgtggacagccaacgttggtaaggggcagcccagtgtcctgcaggtggtgaacctgcccattgtggagcggccggtctgcaaggactccacccggatccgcatcactgacaacatgttctgtgctggttacaagcctgatgaagggaaacgaggggatgcctgtgaaggtgacagtgggggaccctttgtcatgaagagcccctttaacaaccgctggtatcaaatgggcatcgtctcatggggtgaaggctgtgaccgggatgggaaatatggcttctacacacatgtgttccgcctgaagaagtggatacagaaggtcattgatcagtttggagagtaggggccactcatattctgggctcctggaaccaatcccgtgaaagaattatttttgtgtttctaaaactatggttcccaataaaagtgactctcagcgg

SEQ ID NO: 31 - DNA, 2807 bp, homo sapiens
tattcagcgatggactttgcatggtggccctgtctcatcttggctctgctctccagcttggcagcctctgcttcccgagaagcccctttcggctgcttgggaaacggagcctcccggaaggggtggccaatggcatcgaggtctacagtaccaaaatcaactccaaggtgacctcccgttttgctcacaatgttgtcaccatgagagccgtcaaccgtgcagacacggccaaggaggtttcctttgatgtggagctgcccaagacggccttcatcaccaacttcaccttgaccatcgacggtgttacctaccctgggaatgtcaaggagaaggaagttgccaagaagcagtatgaaaaggctgtgtcccagggcaagacggccggcttggtcaaggcctctgggaggaagttggagaagttcacagtctcggtcaacgtggctgcaggcagcaaagtcaccttcgagctaacctacgaggagctgctgaagaggcacaagggcaagtacgagatgtacctcaaggtccagcctaagcaactggtcaaacactttgagatcgaggtagacatcttcgagcctcagggaatcagcatgctggatgctgaggcctctttcatcaccaacgacctcctgggaagcgccctcaccaagtccttctcagggaaaaagggccatgtgtccttcaagcccagcttagaccaacagcgttcatgcccaacctgtacagattccctcctcaatggagatttcactatcacctatgacgtgaacagagaatctcctggcaacgtgcagatagtcaatggctacttcgtgcacttctttgcacctcaaggccttccagtggtgcctaagaacgtggcctttgtgattgacatcagcggctccatggctggtcggaaattagagcagacaaaggaggcccttctcagaatcctggaagatatgaaagaggaagactatctgaatttcatcctgttcagtggagatgtgtccacatggaaagagcacttagtccaggccacgcccgagaacctccaggaggccaggacgtttgtgaagagcatggaggataaaggaatgaccaacatcaatgacgggctgctgaggggcatcagtatgctgaacaaggcccgagaggagcacagaatcccagagaggagcacctccattgtcatcatgctgactgatggggatgccaatgttggtgagagcagacccgaaaaaatccaagagaatgtgcggaatgccatcgggggcaagttccccttgtataacctgggctttggcaacaatctgaattataacttcctggagaacatggccctggagaaccatgggtttgcccggcgcatttatgaggactctgatgccgatttgcagttgcagggcttctatgaggaggtggccaacccactgctgacgggtgtggagatggagtaccccgagaacgctatcctggacctcacccagaacacttaccagcacttctacgatggctctgagatcgtggtggccgggcgcctggtggacgaggacatgaacagctttaaggcagatgtgaagggccatggggccaccaacgacctgaccttcacagaggaggtggacatgaaggagatggagaaggccctgcaggagcgggactacatcttcgggaattacattgagcggctctgggcctacctcaccattgagcagctgctggagaagcgcaagaacgcccatggcgaggagaaggagaacctcacggcccgggccctggacctgtccctcaagtatcactttgtgactccactgacctcaatggtggtgaccaagcctgaggacaacgaggatgagagggccattgccgacaagcctggggaagatgcagaagccacaccggtgagccccgccatgtcctacctgaccagctaccagcctcctcaaaacccctactactatgtggacggggatccccacttcatcatccaaattccggagaaagacgatgccctctgcttcaacatcgatgaagccccaggcacagtgctgcgccttattcaggatgcagtcacaggcctcacagttaatgggcagatcactggcgacaagagaggcagccctgactccaagaccagaaagacttactttggaaaactgggcattcgcaatgctcagatggacttccaggtggaggtgacaacggagaagatcacctgtggaacaggccgtgcgagcactttcagctggctggacacagtcacagtcacgcaggatgggctgtccatgatgatcaacaggaagaacatggtggtctcctttggagatggggttaccttcgtggtcgtcctacaccaggtgtggaagaaacatcctgtccaccgtgactttctaggcttctacgtggtggacagtcaccggatgtcagcacagacgcatgggctgctggggcaattcttccaaccctttgactttaaagtgtctgacatccggccaggctctgaccccacaaagccagatgccacattggtggtgaagaaccatcagctgattgtcaccaggggctcccagaaagactacagaaaggatgccagcatcggcacgaaggttgtctgctggttcgtccacaacaacggagaagggctgattgatggtgtccacactgactacattgtccccaacctgttttgagtagacacaccagctcctgttgggatggatggcccggattttatggcatctggaacatgggcacagagaggggcctgtgggaggggctgggaaaataaagtccaaggtcgagccagaaaaaaaaaaaaa

SEQ ID NO: 32 - DNA, 11564 bp, homo sapiens
tcggcgggggcccgctcccaggcccgctcccgagcccgttccgctcccgtccgccttcttctcgccttctctccgcgtggctcctccgtcccggcgtctccaaaactgaatgagcgagcggcgcgtagggcgcgcggcggcggcggcggcggcggcggcatggagcgcagtggctgggcccggcagactttcctcctagcgctgttgctgggggcgacgctgagggcgcgcgcggcggctggctattacccccgcttttcgcccttctttttcctgtgcacccaccacggggagctggaaggggatggggagcagggcgaggtgctcatttccctgcatattgcgggcaaccccacctactacgttccgggacaagaataccatgtgacaatttcaacaagcaccttttttgacggcttgctggtgacaggactatacacatctacaagtgttcaggcatcacagagcattggaggttccagtgctttcggatttgggatcatgtctgaccaccagtttggtaaccagtttatgtgcagtgtggtagcctctcacgtgagtcacctgcccacaaccaacctcagtttcatctggattgctccacctgcgggcacaggctgtgtgaatttcatggctacagcaacacaccggggccaggttattttcaaagatgctttagcccagcagttgtgtgaacaaggagctccaacagatgtcactgtgcacccacatctagctgaaatacatagtgacagcattatcctgagagatgactttgactcctaccaccaactgcaattaaatccaaatatatgggttgaatgtaacaactgtgagactggagaacagtgtggcgcgattatgcatggcaatgccgtcaccttctgtgaaccatatggcccacgagaactgattaccacaggccttaatacaacaacagcttctgtcctccaattttccattgggtcaggttcatgtcgctttagttattcagaccccagcatcatcgtgttatatgccaagaataactctgcggactggattcagctagagaaaattagagccccttccaatgtcagcacaatcatccatatcctctaccttcctgaggacgccaaaggggagaatgtccaatttcagtggaagcaggaaaatcttcgtgtaggtgaagtgtatgaagcctgctgggccttagataacatcttgatcatcaattcagctcacagacaagtcgttttagaagatagtctcgacccagtggacacaggcaactggcttttcttcccaggagctacagttaagcatagctgtcagtcagatgggaactccatttatttccatggaaatgaaggcagcgagttcaattttgccaccaccagggatgtagatctttccacagaagatattcaagagcaatggtcagaagaatttgagagccagcctacaggatgggatgtcttgggagctgtcattggtacagaatgtggaacgatagaatcaggcttatcaatggtcttcctcaaagatggagagaggaaattatgcactccatccatggacactaccggttatgggaacctgaggttttactttgtgatgggaggaatttgtgaccctggaaattctcatgaaaatgacataatcctgtatgcaaaaattgaaggaagaaaagagcatataacactggataccctttcctattcctcatataaggttccgtctttggtttctgtggtcatcaatcctgaacttcagactcctgctaccaaattttgtctcaggcaaaagaaccatcaaggacataataggaatgtctgggctgtagactttttccatgtcttgcctgttctcccttctacaatgtctcacatgatacagttttccatcaatctgggatgtggaacgcatcagcctggtaacagtgtcagcttggaattttctaccaaccatgggcgctcctggtccctccttcacactgaatgcttacctgagatctgtgctggaccccacctcccccacagcactgtctactcctctgaaaactacagtgggtggaaccgaataacaattccccttcctaacgcagcactaacccggaacaccaggattcgctggagacaaacaggaccaatccttggaaacatgtgggcaattgataatgtttatattggcccgtcatgtctcaaattctgttctggcagaggacagtgcactagacatggttgcaagtgtgaccctggattttctggcccagcttgtgagatggcatcccagacattcccaatgtttatttctgaaagctttggcagttccaggctctcctcttaccataacttttactctatccgtggtgctgaagtcagctttggttgtggtgtcttggccagtggtaaggccctggttttcaacaaagatgggcggcgtcagctaattacatctttccttgacagctcacaatccaggtttctccagttcacactgagactggggagcaaatctgttctgagcacgtgcagagcccctgatcagcctggtgaaggagttttgttgcattattcttatgataatgggataacttggaaactcctggagcattattcatatctcagctatcatgagcccagaataatctccgtagaactaccaggtgatgcaaagcagtttggaattcagttcagatggtggcaaccgtatcattcttcccagagagaagatgtatgggctattgatgagattatcatgacatctgtgcttttcaacagcattagtcttgactttaccaatcttgtggaggtcactcagtctctgggattctaccttggaaatgttcagccatactgtggccacgactggaccctttgttttacaggagattctaaacttgcctcaagtatgcgctatgtggaaacacaatcaatgcagataggagcatcctatatgattcagttcagtttggtgatgggatgtggccagaaatacaccccacacatggacaaccaggtgaagctggagtactcaaccaaccacggccttacctggcacctcgtccaagaagaatgccttccaagtatgccaagttgtcaggaatttacatcagcaagtatttaccatgccagtgagtttacacagtggaggagagtcatagtgcttcttccccagaaaacttggtccagtgctacccgtttccgctggagccagagctattacacagctcaagacgagtgggctttggacagcatttacattgggcagcagtgccccaacatgtgcagtgggcatggctcatgcgatcatggcatatgcaggtgtgaccaggggtaccaaggcactgaatgccacccagaagctgcccttccgtccacaattatgtcagattttgagaaccagaatggctgggagtctgactggcaagaagttattgggggagaaattgtaaaaccagaacaagggtgtggtgtcatctcttctggatcatctctgtacttcagcaaggctgggaaaagacagctggtgagttgggacctggatacttcttgggtggactttgtccagttctacatccagataggcggagagagtgcttcatgcaacaagcctgacagcagagaggagggcgtcctccttcagtacagcaacaatgggggcatccagtggcacctgctagcagagatgtacttttcagacttcagcaaacccagatttgtctatctggagcttccagctgctgccaagaccccttgcaccaggttccgctggtggcagcccgtgttctcaggggaggactatgaccagtgggcagtcgatgacatcatcattctgtccgagaagcagaagcagatcatcccagttatcaatccaactttacctcagaacttttatgagaagccagcttttgattaccctatgaatcagatgagtgtgtggttgatgttggctaatgaaggaatggttaaaaatgaaaccttctgtgctgccacaccatcagcaatgatatttggaaaatcagatggagatcgatttgcagtaactcgagatttgaccctgaaacctggatatgtgctacagttcaagctaaacataggttgtgccaatcaattcagcagtactgctccagttcttcttcagtactctcatgatgctggtatgtcctggtttctggtgaaagaaggctgttacccggcttctgcaggcaaaggatgcgaaggaaactccagagaactaagtgagcccaccatgtatcacacaggggactttgaagaatggacaagaatcaccattgttattccaaggtctcttgcatccagcaagaccagattccgatggatccaggagagcagctcacagaaaaacgtgcctccatttggtttagatggagtgtacatatccgagccttgtcccagttactgcagtggccatggggactgcatttcaggagtgtgtttctgtgacctgggatatactgctgcacaaggaacctgtgtgtcaaatgtccccaatcacaatgagatgttcgataggtttgaggggaagctcagccctctgtggtacaagataacaggtgcccaggttggaactggctgtggaacacttaacgatggcaaatctctctacttcaatggccctgggaaaagggaagcccggacggtccctctggacaccaggaatatcagacttgttcaattttatatacaaattggaagcaaaacttcaggcattacctgcatcaaaccaagaactagaaatgaagggcttattgttcagtattcaaatgacaatgggatactctggcatttgcttcgagagttggacttcatgtccttcctggaaccacagatcatttccattgacctgccacaggacgcgaagacacctgcaacggcatttcgatggtggcaaccgcaacatgggaagcattcagcccagtgggctttggatgatgttcttataggaatgaatgacagctctcaaactggatttcaagacaaatttgatggctctatagatttgcaagccaactggtatcgaatccaaggaggtcaagttgatattgactgtctctctatggatactgctctgatattcactgaaaacataggaaaacctcgttatgctgagacctgggattttcatgtgtcagcatctacctttttgcagtttgaaatgagcatgggctgtagcaagcccttcagcaactcccacagtgtacagctccagtattctctgaacaatggcaaggactggcatcttgtcaccgaagagtgtgttcctccaaccattggctgtctgcattacacggaaagttcaatttacacctcggaaagattccagaattggaagcggatcactgtctaccttccactctccaccatttctcccaggacccggttcagatggattcaggccaactacactgtgggggctgattcctgggcgattgataatgttgtactggcctcagggtgcccttggatgtgctcaggacgagggatttgtgatgctggacgctgtgtgtgtgaccggggctttggtggaccctattgtgttcctgttgttcctctgccctcgattcttaaagacgatttcaatgggaatttacatcctgacctttggcctgaagtgtatggtgcagagagggggaatctgaatggtgaaaccatcaaatctggaacatctctaatttttaaaggggaaggactaaggatgcttatttcaagagatctagattgtacaaatacaatgtatgtccagttttcacttagatttatagcaaaaagtaccccagagagatctcactctattctgttacaattctccatcagtggaggaatcacttggcacctgatggatgaattttactttcctcaaacaacgaatatacttttcatcaatgttcccttgccatacactgcccaaaccaatgctacaagattcagactctggcaaccttataataacggtaagaaagaagaaatctggattgttgatgacttcattatcgatggaaataatgtaaacaaccctgtgatgctcttggatacatttgattttgggcccagagaagacaattggtttttctatcctggtggtaacatcggtctttattgtccatattcttcaaagggggcacctgaagaagattcagctatggtgtttgtttcaaatgaagttggtgagcattccattaccacccgtgacctaaatgtgaatgagaacaccatcatacaatttgagatcaacgttggctgttcgactgatagctcatccgcggatccagtgagactggaattttcaagggacttcggggcgacctggcaccttctgctgcccctctgctaccacagcagcagccacgtcagctctttatgctccaccgagcaccaccccagcagcacctactacgcaggaaccatgcagggctggaggagggaggtcgtgcactttgggaagctgcacctttgtggatctgtccgtttcagatggtaccagggattttaccctgccggctctcagccagtgacatgggccattgataatgtctacatcggtccccagtgtgaggagatgtgtaatggacaggggagctgtatcaatggaaccaaatgtatatgtgaccctggctactcaggtccaacctgtaaaataagcaccaaaaatcctgattttctcaaagatgatttcgaaggtcagctagaatctgatagattcttattaatgagtggtgggaaaccatctcgaaagtgtggaatcctttctagtggaaacaacctctttttcaatgaagatggcttgcgcatgttgatgacacgagacctggatttatcacatgctagatttgtgcagttcttcatgagactgggatgtggtaaaggcgttcctgaccccaggagtcaacccgtgctcctacagtattctctcaacggtggcctctcgtggagtcttcttcaggagttccttttcagcaattccagcaatgtgggcaggtacattgccctggagatacccttgaaagcccgttctggttctactcgccttcgctggtggcaaccgtctgagaatgggcacttctacagcccctgggttatcgatcagattcttattggaggaaatatttctggtaatacggtcttggaagatgatttcacaacccttgatagtaggaaatggctgcttcacccaggaggcaccaagatgcccgtgtgtggctctactggtgatgccctggtcttcattgaaaaggccagcacccgttacgtggtcagcacagacgttgccgtgaatgaggattccttcctacagatagacttcgctgcctcctgctcagtcacagactcttgttatgcgattgaattggaatactcagtagatcttggattgtcatggcacccattggtaagggactgtctgcctaccaatgtggaatgcagtcgctatcatctgcaacggatcctggtgtcagacactttcaacaagtggactagaatcactctgcctctccctccttataccaggtcccaagccactcgtttccgttggcatcaaccagctccttttgacaagcagcagacatgggcaatagataatgtctatatcggggatggctgcatagacatgtgcagtggccatgggagatgcatccagggaaactgcgtctgtgatgaacagtggggtggcctgtactgtgatgaccccgagacctctcttccaacccaactcaaagacaacttcaatcgagctccatccagtcagaactggctgactgtgaacggagggaaattgagtacagtgtgtggagccgtggcgtcgggaatggctctccatttcagtgggggttgtagtcgattattagtcactgtggatctaaacctcactaatgctgagttcatccaattttacttcatgtatgggtgcctgattacaccaaacaaccgtaaccaaggtgttctcttggaatattctgtcaatggaggcattacctggaacctgctcatggagattttctatgaccagtacagtaagcccgggtttgtgaatatccttctccctcctgatgctaaagagattgccactcgcttccgctggtggcagccaagacatgacggcctggatcagaacgactgggccattgacaatgtcctcatctcaggctctgctgaccaaaggaccgttatgctggacaccttcagcagcgccccagtaccccagcatgagcgctcccctgcagatgccggccctgtcgggaggatcgcctttgacatgtttatggaagacaaaacttcagtgaatgagcactggctattccatgatgattgtacagtagaaagattctgtgactcccctgatggtgtgatgctctgtggcagtcatgatggacgggaggtgtatgcagtgacccatgacctgactcccactgaaggctggattatgcaattcaagatctcagttggatgtaaggtgtctgaaaaaattgcccagaatcaaattcatgtgcagtattctactgacttcggtgtgagttggaattatctggtccctcagtgcttgcctgctgacccaaaatgctctggaagtgtttctcagccatctgtattctttccaactaaagggtggaaaaggatcacctacccacttcctgaaagcttagtgggaaatccggtaaggtttaggttctatcagaagtactcagacatgcagtgggcaatcgataatttctacctgggccctggatgcttggacaactgcaggggccatggagattgcttaagggaacagtgcatctgtgatccgggatactcagggccaaactgctacttgacccacactctgaagactttcctgaaggaacgctttgacagtgaagaaatcaaacctgacttatggatgtccttagaaggtggaagtacttgcactgagtgtggaattcttgccgaggacactgcactctattttgggggatccactgtgagacaagcggttacacaagatttggatcttcgaggtgcaaagttcctgcaatactgggggcgcatcggtagtgagaacaacatgacctcttgccatcgtcccatctgccggaaggaaggcgtgctgttggactactctaccgatggaggaattacctggactttgctccatgagatggattaccagaaatacatttctgttagacacgactacatacttcttcctgaagatgccctcaccaacacaactcgacttcgctggtggcagccttttgtgatcagcaatggaattgtggtctctggggtggagcgtgctcagtgggcactggacaacattttgattggtggagcagaaatcaatcccagccaattggtggacacttttgatgatgaaggcacttcccatgaagaaaactggagtttttaccctaatgctgtaaggacagcaggattttgtggcaatccatcctttcacctctattggccaaataaaaagaaggacaagactcacaatgctctctcctcccgagaactcattatacagccaggatacatgatgcagtttaaaattgtggtgggttgtgaagccacttcttgtggtgaccttcattccgtaatgctggaatacactaaggatgcaagatcggattcctggcagctcgtacagacccagtgccttccttcctcttctaacagcattggctgctcccctttccagttccatgaagccaccatctacaactctgtcaacagctcaagctggaaaagaatcaccatccagctgcctgaccatgtctcctctagtgcaacacagttccgctggatccagaagggagaagaaactgagaagcaaagctgggcaattgaccacgtgtacattggagaggcttgccccaagctctgcagcgggcacggatactgcacgaccggtgccatctgcatctgcgacgagagcttccaaggtgatgactgctctgttttcagtcacgaccttcccagttatattaaagataattttgagtccgcaagagtcaccgaggcaaactgggagaccattcaaggtggagtcataggaagtggctgtgggcagctggccccctacgcccatggagactcactgtactttaatggctgtcagatcaggcaagcagctaccaagcctctggatctcactcgagcaagcaaaatcatgtttgttttgcaaattgggagcatgtcgcagacggacagctgcaacagtgacctgagtggcccccacgctgtggacaaggcagtgctgctgcaatacagcgtcaacaacgggatcacctggcatgtcatcgcccagcaccagccaaaggacttcacacaagctcagagagtgtcttacaatgtccccctggaggcacggatgaaaggagtcttactgcgctggtggcaaccacgccacaatggaacaggtcatgatcaatgggctttggaccatgtggaggtcgtcctagtaagcactcgcaaacaaaattacatgatgaatttttcacgacaacatgggctcagacatttctacaacagaagacgaaggtcacttaggcgatacccatgaagaatcaaaaagtttattttttttcttccaacatgtgatgtgttgctctccattcttttaaatctcgcactacatctgatatcaggaaatatctgtgaaggacttggtgattacctgaaagcccttctcaagaccgagtgtacaccactttcccacactgtgaactaatgacaagtgacttatttgctcataagtaaatgtcttcatgttgatgtgtccgtgaaagttgtgatctgttgtaatatcagttacagtggcagtattgacaataagaaacagtttaacagaaaaatgaaatttaagcacaaaaaatttaagagattttatgtttaaaatggcatttagcacagtatttaacattcttggtcacaaagctatttaagtggactgtatttcggctatgtctcatgttttatatgattaaattatcattgtttgtcctttatgtattctcttctacaatacaacacattgaaactgtatttacttgttatgttgtaatattttgctgctgaatttggggctacttatattctgcagaaaattaattgaaatacctattcaagaagatagttgtaaagatattgtatctcctttaatatactccttaaaaatgtatgttggtttagcgttgttttgtggataagaaaaatgcttgaccctgaaatattttctactttaaattgtggatgaagaccctatctcccacaaataagttcccatttccttgtctaaagatctttttttaagtgttctgtggctgatttactaacagtaactgccattttttgtctgtgataacagagtgatttgtaaaacagtggttgttttttcattgtgttttcttcgtggattgttttttctgcgggtcatattcataccttctgatgaagttgtacaacaccagcaacattataatggccctgtagctctgaatgctatttgtgtaactgaaaggttgcactctagggtgaaccaagctataaaagcccatgcttaaataaaaattatgtccaaaagcc

SEQ ID NO: 33 - DNA, 1599 bp, homo sapiens
cactgcttattaaagtacactattcaggcatatcatgtaggtttactttctgtgtttctagagaccaagaagcgggacgttcaccatgggaagaaaatcgctgtaccttctgattgtggggatcctcatagcatattatatttatacgcctctcccagataacgttgaggagccatggagaatgatgtggataaacgcacatctgaaaactatacaaaatttggctacatttgtggagctccatgggagttccatttttatggattcctttaaggttgtcgggagctttgatgaagtcccaccaacctcagatgaaaatgtcactgtgactgagacaaaattcaacaacattcttgttcgggtatatgtgccaaagagaaagtctgaagcactaagaagggggttgttttacatccatggtggaggctggtgcgtgggaagtgctgctctaagtggttatgacttgctgtcaagatggacagcagacagacttgatgctgtcgtcgtatcaaccaactacagattagcacctaagtatcatttcccaattcaatttgaagatgtatataatgccttaaggtggttcttacgtaaaaaagttcttgcaaaatatggtgtgaaccctgagagaatcggtatttctggagatagtgcaggagggaatttagctgcagcagtgactcaacagctccttgatgacccagatgtcaagatcaaactcaagatccagtctttaatttatcctgcccttcagcctcttgatgtagatttaccgtcatatcaagaaaattcaaattttctatttctatccaaatcactcatggtcagattctggagtgaatattttaccactgatagatcacttgaaaaagccatgctttccagacaacatgtacctgtggaatcaagtcatctcttcaaatttattaattggagttccctgctccctgagaggtttataaaaggacatgtttataacaatccaaattatggcagttctgagctggctaaaaaatatccagggttcctagatgtgagggcagcccctttgttggctgatgacaacaaattacgtggcttacccctgacctatgtcatcacctgtcaatatgatctcttaagagatgatggactcatgtatgtcacccgacttcgcaacactggggttcaggtgactcataaccatgttgaggatggattccatggagcattttcatttctgggacttaaaattagtcacagacttataaatcagtatattgagtggctaaaggaaaatctatagtaaaacatgtagctataacatattttaaaaataaaatctgaaaacctcagaaaatttcgattagaaattggtctttcttagaatggtctagttaagttccacatgtagcataattcttaaataggcacttttctgttttttttttcttactgtgggatttcatttcaattttctacattgtctatctgctttttcggagattttccttcttacactgttaatcttattttaaaaaatattacattcttgtatactttatttttgtgagttggctactatttacgatgcaagagaataaatgtgagcaaagattg

SEQ ID NO: 34 - DNA, 1326 bp, homo sapiens
cagagtggagcggccgccggagatgcctgacgcatctgtctgaggagcggtcagtgacgcgatggagcgggcaagggatcgcttacacctgagacgaactacagaacagcacgtaccagaggtggaagtccaagtcaaacgcagaaggactgcctcactgagcaaccaagagtgtcagttgtacccgaggcgttctcagcagcagcaagtacctgtggtggatttccaggctgaactgaggcaggcattcttagctgagacaccaagaggtggttaaagccatattggagtagcgaggaatctgattccaagcaaaaaccaggctccatctactctttgaagcttctgcccagcttgcattgtttctaggagaacctgcgtcatacctttatctatagccttcccctaggtcttcagaagcatcaagttttaactgtggacattggatttggtggaacagcaatcatgactgttggcaagagtagcaagatgctgcagcacattgactatagaatgagatgtatcctgcaagatggccgaatcttcattggcacctttaaggcttttgacaagcatatgaatttgatcctctgtgattgtgatgagttcagaaagatcaagccaaagaatgcgaagcaaccagagcgtgaagaaaagcgggttttgggtctggtgttgctgcgtggggagaacttggtatccatgactgtggaggggccaccccccaaagatactggcattgctcgggtaccacttgctggagctgctggaggccctggggttggtagggcagctggtagaggagtaccagctggtgtgccaattccccaggcccctgctggattggcaggccctgtccgaggagttgggggaccatcccagcaggtaatgactccacagggaagaggcactgtagcagctgctgctgttgctgcgactgccagtattgctggagccccaacacagtacccaccaggacggggcactccgcccccacccgtcggcagagcaaccccacctccaggcattatggctcctccacctggtatgagaccacccatgggcccaccaattgggcttccccctgctcgagggacgccaataggcatgccgcctccgggaatgagaccccctccaccaggcattagaggtccacctcccccaggaatgcgtccaccaagaccttagcatactgttgatccatctcagtcactttttcccctgcaatgcgtcttgtgaaattgtgtagagtgtttgtgagctttttgttccctcattctgcattaataatagctaataataaatgcatagagcaattaaactgtg

SEQ ID NO: 35 - DNA, 1405 bp, homo sapiens
gcaggccttgcccggaccagcccctcctccactctcctctcccctgtgagctccacctgccccagttctcctggctttaacccctccttggccaaggccagggttgcctgcgggagccaggcgtccgctctccacacctttcacagccccagccctcagagcaacctcagcccagcccagcccagctccagctccagctccagcccgggccccatcatggccaaggactttcaagatatccagcagctgagctcggaggaaaatgaccatcctttccatcaaggtgaggggccaggcactcgcaggctgaatcccaggagaggaaatccatttttgaaagggccacctcctgcccagcccctggcacagcgtctctgctccatggtctgcttcagtctgcttgccctgagcttcaacatcctgctgctggtggtcatctgtgtgactgggtcccaaagtgagggtcacagaggtgcacagctgcaagccgagctgcggagcctgaaggaagctttcagcaacttctcctcgagcaccctgacggaggtccaggcaatcagcacccacggaggcagcgtgggtgacaagatcacatccctaggagccaagctggagaaacagcagcaggacctgaaagcagatcacgatgccctgctcttccatctgaagcacttccccgtggacctgcgcttcgtggcctgccagatggagctcctccacagcaacggctcccaaaggacctgctgccccgtcaactgggtggagcaccaaggcagctgctactggttctctcactccgggaaggcctgggctgaggcggagaagtactgccagctggagaacgcacacctggtggtcatcaactcctgggaggagcagaaattcattgtacaacacacgaaccccttcaatacctggataggtctcacggacagtgatggctcttggaaatgggtggatggcacagactataggcacaactacaagaactgggctgtcactcagccagataattggcacgggcacgagctgggtggaagtgaagactgtgttgaagtccagccggatggccgctggaacgatgacttctgcctgcaggtgtaccgctgggtgtgtgagaaaaggcggaatgccaccggcgaggtggcctgaccccagcacacctctggctaacccataccccacacctgcccagctctggcttctctgttgaggattttgaggaaaggaagaaacactgagacaggggtatggggaagagctgagcaaagagagaaaggaggtagtttaagagtccctgaccctggaggactgagatcccacctccttctgtaattcattgtaattattataatcgtcagcctcttcaatggcgtaggaaagaagaaacaaatgcttgaatctc

SEQ ID NO: 36 - DNA, 3259 bp, homo sapiens
gagttcagaagcctcctggcagacactggagccacgatgaagcccccaaggcctgtccgtacctgcagcaaagttctcgtcctgctttcactgctggccatccaccagactactactgccgaaaagaatggcatcgacatctacagcctcaccgtggactccagggtctcatcccgatttgcccacacggtcgtcaccagccgagtggtcaatagggccaatactgtgcaggaggccaccttccagatggagctgcccaagaaagccttcatcaccaacttctccatgatcatcgatggcatgacctacccagggatcatcaaggagaaggctgaagcccaggcacagtacagcgcagcagtggccaagggaaagagcgctggcctcgtcaaggccaccgggagaaacatggagcagttccaggtgtcggtcagtgtggctcccaatgccaagatcacctttgagctggtctatgaggagctgctcaagcggcgtttgggggtgtacgagctgctgctgaaagtgcggccccagcagctggtcaagcacctgcagatggacattcacatcttcgagccccagggcatcagctttctggagacagagagcaccttcatgaccaaccagctggtagacgccctcaccacctggcagaataagaccaaggctcacatccggttcaagccaacactttcccagcagcaaaagtccccagagcagcaagaaacagtcctggacggcaacctcattatccgctatgatgtggaccgggccatctccgggggctccattcagatcgagaacggctactttgtacactactttgcccccgagggcctaaccacaatgcccaagaatgtggtctttgtcattgacaagagcggctccatgagtggcaggaaaatccagcagacccgggaagccctaatcaagatcctggatgacctcagccccagagaccagttcaacctcatcgtcttcagtacagaagcaactcagtggaggccatcactggtgccagcctcagccgagaacgtgaacaaggccaggagctttgctgcgggcatccaggccctgggagggaccaacatcaatgatgcaatgctgatggctgtgcagttgctggacagcagcaaccaggaggagcggctgcccgaagggagtgtctcactcatcatcctgctcaccgatggcgaccccactgtgggggagactaaccccaggagcatccagaataacgtgcgggaagctgtaagtggccggtacagcctcttctgcctgggcttcggtttcgacgtcagctatgccttcctggagaagctggcactggacaatggcggcctggcccggcgcatccatgaggactcagactctgccctgcagctccaggacttctaccaggaagtggccaacccactgctgacagcagtgaccttcgagtacccaagcaatgccgtggaggaggtcactcagaacaacttccggctcctcttcaagggctcagagatggtggtggctgggaagctccaggaccgggggcctgatgtgctcacagccacagtcagtgggaagctgcctacacagaacatcactttccaaacggagtccagtgtggcagagaggaggcggagttccagagccccaagtatatcttccacaacttcatggagaggctctgggcatacctgactatccagcagctgctggagcaaactgtctccgcatccgatgctgatcagcaggccctccggaaccaagcgctgaatttatcacttgcctacagctttgtcacgcctctcacatctatggtagtcaccaaacccgatgaccaagagcagtctcaagttgctgagaagcccatggaaggcgaaagtagaaacaggaatgtccactcaggttccactttcttcaaatattatctccagggagcaaaaataccaaaaccagaggcttccttttctccaagaagaggatggaatagacaagctggagctgctggctcccggatgaatttcagacctggggttctcagctccaggcaacttggactcccaggacctcctgatgttcctgaccatgctgcttaccaccccttccgccgtctggccatcttgcctgcttcagcaccaccagccacctcaaatcctgatccagctgtgtctcgtgtcatgaatatgaaaatcgaagaaacaaccatgacaacccaaaccccagcccccatacaggctccctctgccatcctgccactgcctgggcagagtgtggagcggctctgtgtggaccccagacaccgccaggggccagtgaacctgctctcagaccctgagcaaggggttgaggtgactggccagtatgagagggagaaggctgggttctcatggatcgaagtgaccttcaagaaccccctggtatgggttcacgcatcccctgaacacgtggtggtgactcggaaccgaagaagctctgcgtacaagtggaaggagacgctattctcagtgatgcccggcctgaagatgaccatggacaagacgggtctcctgctgctcagtgacccagacaaagtgaccatcggcctgttgttctgggatggccgtggggaggggctccggctccttctgcgtgacactgaccgcttctccagccacgttggagggacccttggccagttttaccaggaggtgctctggggatctccagcagcatcagatgacggcagacgcacgctgagggttcagggcaatgaccactctgccaccagagagcgcaggctggattaccaggaggggcccccgggagtggagatttcctgctggtctgtggagctgtagttctgatggaaggagctgtgcccaccctgtacacttggcttccccctgcaactgcagggccgcttctggggcctggaccaccatggggaggaagagtcccactcattacaaataaagaaaggtggtgtgagcctgggaagtgggtgtctccagttccatgtggccaaatcctagggcctcaacctcgcatcctgaaccttagcatcgtggaacacagaagcttccactgtcagctctcaagagcccatggccaggaaggcccatgctgagctttcagtccagccccttcattttacaaacaaggaaactgagctcgaaccacccatttgagatgtcactgtggcccccagctagaggcccagggctgggagcattctccaggagcagaggttcagtctgcttcatggtctcttggaccagttttgactaca

SEQ ID NO: 37 - DNA, 959 bp, homo sapiens
gggcatgaatatcagacgctagggggacagccactgtgttgtctgctaccctcatcctggtcactgcttctgctataacagccctaggccaggaatatgaacaagccgctgctttggatctctgtcctcaccagcctcctggaagcctttgctcacacagacctcagtgggaaggtgtttgtatttcctagagaatctgttactgatcatgtaaacttgatcacaccgctggagaagcctctacagaactttaccttgtgttttcgagcctatagtgatctctctcgtgcctacagcctcttctcctacaatacccaaggcagggataatgagctactagtttataaagaaagagttggagagtatagtctatacattggaagacacaaagttacatccaaagttatcgaaaagttcccggctccagtgcacatctgtgtgagctgggagtcctcatcaggtattgctgaattttggatcaatgggacacctttggtgaaaaagggtctgcgacagggttactttgtggaagctcagcccaagattgtcctggggcaggaacaggattcctatgggggcaagtttgataggagccagtcctttgtgggagagattggggatttgtacatgtgggactctgtgctgcccccagaaaatatcctgtctgcctatcagggtacccctctccctgccaatatcctggactggcaggctctgaactatgaaatcagaggatatgtcatcatcaaacccttggtgtgggtctgaggtcttgactcaacgagagcacttgaaaatgaaatgactgtctaagagatctggtcaaagcaactggatactagatcttacatctgcagtctttcttctttgaatttcctatctgtatgtctgcctaattaaaaaaatatatattgtattatgctacctgcaaaaaaaaaaaaaaaaaaaaaaaaaaaaaa

SEQ ID NO: 38 - DNA, 2262 bp, homo sapiens
ctccgacccgggcttttccttcgtaccctgcggccccctccgcacccctcacggagctcctcgggtcctgccccctcccagcgcttgcccgcgccgccccgcccccgtttttaaacctggcgcgcgggtaggtgagcgcgttagcccgagtggatctaggcgcgctcgtaggccggcgccgcagcaaggggcgcgggctccgccggcaccatggagcccgaagcggcggccggagcccggaaggcgcgggggcgcggctgtcactgccccggggacgctccctggaggcctccgccaccgcgcgggccggagagccccgcgccgtggcgaccttggatccagacacctggagatgctgagctgaccagaactggaaggccgcttgaacctagggctgaccaacacacttttggatcaaagggagcctttgggtttcagcatcctgtaagagtctatttacccatgtcaaagcgtcaagaatacctgcggagttccggggagcaagtactggccagtttcccagtgcaagccacgattgacttctacgacgatgagtctactgagtctgcttccgaagctgaagagccagaggaaggacccccacccctccatcttctgccccaggaggtgggaggtcggcaggaaaatggcccagggggaaagggcagagaccagggcatcaaccaagggcagcgatcctcaggagggggtgaccactggggggagggtccgctccctcaaggtgtctcctcaaggggtggcaagtgctcctcatccaaatgaatcagtctctgtctcctgggccctgctctgggacctgcccctcacgttctcttggggacacccgagccaggacactacgcatccctgctgagtgtgcagaggctagaggcttctcgggcagcccctggcctgcacactactcatgacagaaagtcagcttttacttttctttcccctggcaattcgtttttggtgcactcatgcatgcctttgagaaaggattctaggagaaagagaaggtctatgtcaacagagttgttatctcatagagccagttttcaaagctccttctgcattgtcactcactgatcaggtgatgaattcttcctagatagtcgcccactccacctcctacttaacctgagactcattatttagctatttctgcttttgtaaaaataattcagatattaaactccaattttaatctatcatccaagggtagatgtagttgcttagtagcattttggaaaaaaaagaaaaaaaggtttggtttggttttgtgacggagttttgctcttgtctcccaggctggagtgcagtgacacaatctcggctcactgcaacctccacttcttgggttcaagtgattctcctgtctcagcctcccaagtggctgggattgcaggcatgagctaccacgcctggctaattttttgtatttttagtagagactcggtttcaccatgttggtcaggctggctttgaactcctgacctcaggtgatccacccgccttggcctcccaaagtgctgggattacaggcgtgagccactgagcccggccaaaaaaaaatgtatttattaaaaaaaaatttttttaacccgccgaataattcccataagagtaacaaaaaggaccagcctgaccagcgtggagaaactctgtctctactaaaaatacaaaattagccaggcgtgatggctcatgcctgtgatcccagctactcgggaggctgaggcaggagaatggctggaacccgggaggcggaggttgccgtgagtcgagatcgcaccattgcattccagcctgggcaacaagagcgaaactccgtctcaaaaaaaaaaaaaaaaaaaaaaagaaagaaaagagtaacagaaagatagggatttttaggagacaattagataaaaatgtatgtgatgactgtataaggaggcctgtgtgtatgaatttatagggagtagaaccgtctctcttcttagttggtgactgtttggggcctggtattttaatagatgaacactacttttttaattttttatttttttaaccctacccttaacccatgaacactatttttaattaaagtatctgatgtaaaattattttgagtttttaatattttgataaacgtgtattcctgaaactttttgacttacttatcttacatgtggtgtcttcctgtatatagtacattatatcaatttctacttgaaataaatattttgaaaaaaaaaaaaaaaaaaaaaaaaaaaa

SEQ ID NO: 39 - DNA, 2422 bp, homo sapiens
atttaaaggagtcgggtctctaactgttgatctgtttttttcccttctgagcaatggagcttaccatctttatcctgagactggccatttacatcctgacatttcccttgtacctgctgaactttctgggcttgtggagctggatatgcaaaaaatggttcccctacctcttggtgaggttcactgtgatatacaacgaacagatggcaagcaagaagcgggagctcttcagtaacctgcaggagtttgcgggcccctccgggaaactctccctgctggaagtgggctgtggcacgggggccaacttcaagttctacccacctgggtgcagggtgacctgtattgaccccaaccccaactttgagaagtttttgatcaagagcattgcagagaaccgacacctgcagtttgagcgctttgtggtagctgccggggagaacatgcaccaggtggctgatggctctgtggatgtggtggtctgcaccctggtgctgtgctctgtgaagaaccaggagcggattctccgcgaggtgtgcagagtgctgagaccgggaggggctttctatttcatggagcatgtggcagctgagtgttcgacttggaattacttctggcaacaagtcctggatcctgcctggcaccttctgtttgatgggtgcaacctgaccagagagagctggaaggccctggagcgggccagcttctctaagctgaagctgcagcacatccaggccccactgtcctgggagttggtgcgccctcatatctatggatatgctgtgaaatagtgtgagctggcagttaagagctgaatggctcaaagaatttaaagcttcagttttacatttaaaatgctaagtgggagaagagaaaccttttttttggggggcggtttttttggtttgttgttggtttttttttttttttttggcgggaagaaagagttttgctcttgttgcccaggctggagtgcagtgacgtgatctccgctcactgcaacctccacctcgcgggtttaggcgattcttctgcctcagcctccctagtagctgggattgcaggtgcccaccaccatgcccggctaatttgtatttttagttgagacagggtttcgctacgttggccaggctggtcttgaactcctgatctcaggcaatccacccacctcggcctcccagagtgctgggatgacaggcgtgagcaaccgcacccagcttaaggtttttttgttttgttttgagacggagttttcgctcttgttgcccaggctggagtgcaatgctgtgatctcggcttaccacaacctccacctcccgggttcaagtgattcacctgcctcagcctcctgagtagctggtattacaggcatgcgtcaccacgccggctaattttgtacttttagtagagatggtgtttccccacgttggtcagcctggccaacatggcaaaaccctactaaagatacaaaaaaaaaaaaaaattagccgggcgtggtggtgggtgcctgtagtcccaggtacttggaaggctgaggcaggagaatctcttgaacccagaaggcgaaggttgcggtgagccgagatcatgccattgtactctagcctgggtgacaagagcaagactccgtctcaaaaaaaaaaaaaaaaaaaaaagaagtagagacagggagacggggtctcactgtgttgcctaggccggtcttgaactcctgggctcaagtgattctcccaccttgacctcctaaattgttgggattacaggtgtgagacagtgcacctggccgaaatagctcaagtttctgaaaaacaaatctgaatctatttgttattcttagcgtcactggtctggctttcagaattaacatacaaggttgccacacctagttctgcccagctttatgtctttattccagtattccaccaaagtttgttttcctgcattccagttctcaagtcttaagataaagattgtacttgacagtttagtatatccataaaactatttgaggtggttaaggttcttgggttcattttccttaatactttgctgaatattgtagattgtaggcaatgaaaaagtctactaaattaggaaaaccttgaataattaggtatcctaggtaagagcccctaaacatcaagcaatctgtgagtctgtaaagaaataaatattttttggattattcttatctaattccacccctgttggaagatgatttctttgttctttgcaactatggaagctgtgaaaatcatcacaagtgcctctgaaagcgagtgttaggttggttagagggtttaatattttctgcaatggtttgtaggaattttaataaatgtagtatattttctgagatgattttgtaaaagtactattttaaatatcaaatcaaccaataaattcacatttgtgttaggaacag

SEQ ID NO: 40 - DNA, 1047 bp, homo sapiens
atgagtgacctgggagctgtcatttccctcctgctctggggacgacagctttttgcactgtactcaggcaatgatgtcacggatatttcagatgaccgcttcccgaagccccctgagattgcaaatggctatgtggagcacttgtttcgctaccagtgtaagaactactacagactgcgcacagaaggagatggagtatacaccttaaatgataagaagcagtggataaataaggctgttggagataaacttcctgaatgtgaagcagtatgtgggaagcccaagaatccggcaaacccagtgcagcggatcctgggtggacacctggatgccaaaggcagctttccctggcaggctaagatggtttcccaccataatctcaccacaggggccacgctgatcaatgaacaatggctgctgaccacggctaaaaatctcttcctgaaccattcagaaaatgcaacagcgaaagacattgcccctactttaacactctatgtggggaaaaagcagcttgtagagattgagaaggtggttctacaccctaactaccaccaggtagatattgggctcatcaaactcaaacagaaggtgcttgttaatgagagagtgatgcccatctgcctaccttcaaagaattatgcagaagtagggcgtgtgggttacgtgtctggctggggacaaagtgacaactttaaacttactgaccatctgaagtatgtcatgctgcctgtggctgaccaatacgattgcataacgcattatgaaggcagcacatgccccaaatggaaggcaccgaagagccctgtaggggtgcagcccatactgaacgaacacaccttctgtgtcggcatgtctaagtaccaggaagacacctgctatggcgatgcgggcagtgcctttgccgttcacgacctggaggaggacacctggtacgcggctgggatcctaagctttgataagagctgtgctgtggctgagtatggtgtgtatgtgaaggtgacttccatccaggactgggttcagaagaccatagctgagaactaa

SEQ ID NO: 41 - DNA, 1836 bp, homo sapiens
cactcggagcccgagcccgagccgcagccgccgcctggggcgcttgggtcggcctcgaggacaccggagaggggcgccacgccgccgtggccgcagatttgaaagaagccgacactaaaccaccaatatacaacaaggccattttgtcaaacgagagtcagcctttaacgaaatgaccatggttgacacagagatgccattctggcccaccaactttgggatcagctccgtggatctctccgtaatggaagaccactcccactcctttgatatcaagcccttcactactgttgacttctccagcatttctactccacattacgaagacattccattcacaagaacagatccagtggttgcagattacaagtatgacctgaaacttcaagagtaccaaagtgcaatcaaagtggagcctgcatctccaccttattattctgagaagactcagctctacaataagcctcatgaagagccttccaactccctcatggcaattgaatgtcgtgtctgtggagataaagcttctggatttcactatggagttcatgcttgtgaaggatgcaagggtttcttccggagaacaatcagattgaagcttatctatgacagatgtgatcttaactgtcggatccacaaaaaaagtagaaataaatgtcagtactgtcggtttcagaaatgccttgcagtggggatgtctcataatgccatcaggtttgggcggatgccacaggccgagaaggagaagctgttggcggagatctccagtgatatcgaccagctgaatccagagtccgctgacctccgggccctggcaaaacatttgtatgactcatacataaagtccttcccgctgaccaaagcaaaggcgagggcgatcttgacaggaaagacaacagacaaatcaccattcgttatctatgacatgaattccttaatgatgggagaagataaaatcaagttcaaacacatcacccccctgcaggagcagagcaaagaggtggccatccgcatctttcagggctgccagtttcgctccgtggaggctgtgcaggagatcacagagtatgccaaaagcattcctggttttgtaaatcttgacttgaacgaccaagtaactctcctcaaatatggagtccacgagatcatttacacaatgctggcctccttgatgaataaagatggggttctcatatccgagggccaaggcttcatgacaagggagtttctaaagagcctgcgaaagccttttggtgactttatggagcccaagtttgagtttgctgtgaagttcaatgcactggaattagatgacagcgacttggcaatatttattgctgtcattattctcagtggagaccgcccaggtttgctgaatgtgaagcccattgaagacattcaagacaacctgctacaagccctggagctccagctgaagctgaaccaccctgagtcctcacagctgtttgccaagctgctccagaaaatgacagacctcagacagattgtcacggaacacgtgcagctactgcaggtgatcaagaagacggagacagacatgagtcttcacccgctcctgcaggagatctacaaggacttgtactagcagagagtcctgagccactgccaacatttcccttcttccagttgcactattctgagggaaaatctgacacctaagaaatttactgtgaaaaagcattttaaaaagaaaaggttttagaatatgatctattttatgcatattgtttataaagacacatttacaatttacttttaatattaaaaattaccatattatgaaaaaaaaaaaaaaaaaaaaaaaaaaaaaaaaaa

SEQ ID NO: 42 - DNA, 4213 bp, homo sapiens
tccactcctggagcccgcggaccccgagcacgcgcctgacagcccctgctggcccggcgcgcggcgtcgccaggccagctatggcccccgacccggtggccgccgagaccgcggctcagggacctaccccgcgctacttcacctgggacgaggtggcccagcgctcagggtgcgaggagcggtggctagtgatcgaccgtaaggtgtacaacatcagcgagttcacccgccggcatccagggggctcccgggtcatcagccactacgccgggcaggatgccacggatccctttgtggccttccacatcaacaagggccttgtgaagaagtatatgaactctctcctgattggagaactgtctccagagcagcccagctttgagcccaccaagaataaagagctgacagatgagttccgggagctgcgggccacagtggagcggatggggctcatgaaggccaaccatgtcttcttcctgctgtacctgctgcacatcttgctgctggatggtgcagcctggctcaccctttgggtctttgggacgtcctttttgcccttcctcctctgtgcggtgctgctcagtgcagttcaggcccaggctggctggctgcagcatgactttgggcacctgtcggtcttcagcacctcaaagtggaaccatctgctacatcattttgtgattggccacctgaagggggcccccgccagttggtggaaccacatgcacttccagcaccatgccaagcccaactgcttccgcaaagacccagacatcaacatgcatcccttcttctttgccttggggaagatcctctctgtggagcttgggaaacagaagaaaaaatatatgccgtacaaccaccagcacaaatacttcttcctaattgggcccccagccttgctgcctctctacttccagtggtatattttctattttgttatccagcgaaagaagtgggtggacttggcctggatgattaccttctacgtccgcttcttcctcacttatgtgccactattggggctgaaagccttcctgggccttttcttcatagtcaggttcctggaaagcaactggtttgtgtgggtgacacagatgaaccatattcccatgcacattgatcatgaccggaacatggactgggtttccacccagctccaggccacatgcaatgtccacaagtctgccttcaatgactggttcagtggacacctcaacttccagattgagcaccatctttttcccacgatgcctcgacacaattaccacaaagtggctcccctggtgcagtccttgtgtgccaagcatggcatagagtaccagtccaagcccctgctgtcagccttcgccgacatcatccactcactaaaggagtcagggcagctctggctagatgcctatcttcaccaataacaacagccaccctgcccagtctggaagaagaggaggaagactctggagccaaggcagaggggagcttgagggacaatgccactatagtttaatactcagagggggttgggtttggggacataaagcctctgactcaaactcctcccttttatcttctagccacagttctaagacccaaagtggggggtggacacagaagtccctaggagggaaggagctgttggggcaggggtgtaaattatttcctttttctagtttggcacatgcaggtagttggtgaacagagagaaccaggagggtaacagaagaggagggacctactgaacccagagtcaggaagagatttaacactaaaattccactcatgccgggcgtggtggcacgcgcctgtaatcccagctacccaggaggctgaggcaggagaatcgcttgaaccggggaggtggaggttgcagtgagctgagatcacgccattgtactccagcctgggcgacagagcaagactccatttcaaaaaaaaaaaaaaaatccactcatataaaaggtgagctcagctcactggtccatttctcagtggcttctccatcctcatttgcaaacctcagagggataaggcagttgaacctgatgagcaagaattataacagcaaggaaacattaatgcttagaattctgagatccagcacaactcagtctgtgggagctcagctcgctgcccagggataggtatgacctatgtctgccttaggctgctgggagatgccattctccagtttcagaagcaggcagggcaaaggtcaagactgtggtattggggtcttttggctctgaaggatcctggaaccactgattttggtttattccctccagggtctaaagagaacaagaggtgctagctcttaccaaaacagatggtagagagagttgctggctatttaaaaagctctttcatcttttaattcacctcttcttttcacctctttaaccactcctcaggaacagaacacttctaggactgggggtcttttagctccataagcaagtgagcagatgggacaagttagtcttttctccctagaaacaaaggggatgcccagtggtttccctttgcttcccaacctaaaatttcaagtttaataaaatagcaattagcagaagtgaccaaattgggagataattatcagtcatgaggaaagacacagatttcggtcataaagaatgtaagggctataagtagaaactttctataacctaaatgatgttatagaattatttttgagcaggagcagaaagattaaatatgatcacttcatacttctaaatcagaaataggaagattaaaaccacagaacagtttgtgatttctattgctgtagctaggtatcttactctgtccactcttgttcaagtatctaactcttctggaaaccaaataggctttagaagagattatcctatattcctatcagtataatactaaaatgtaactttttaatcatctggtttttaaaagataaacagtttagcccatctctccagagagcaaacataggaatatgactcaggagcctcctagggcttatcatcagccctcacacccgcttccccctccaacccacagcctttgcttccaggtggcaggattactactttgcctcttcagcagcatctactctaggcatattgatcattttagacactgggagaagagaacctcaaactaggaggaaaagacagagcctccacttagttttgggaggggatggcagacagtcaaggagatgagcgtcctaaggcatgttgggatagggtcagatgcaccacccatggagaggtttgtcaacacaaagacatggaaggttagaggtttgtcaacaaaaagacatggaaggttaggtttgtcaacacaaagacatggaagattagaggtttgtcaacacaaagacacaggaagaatgggctgcagaagatttagatgttttccatttgggcacattttacttagctggagaactaggtttaaaacagcctgggtaggaaaattagaagcaagctggatgcagtggctcatgcctgtaatcccaacacttttgggaggtccaggcaggaggatcacttgggcccaggaggtcaagcctgcagcgagctgagatcacaccactgcactccagcctggggtgatagaacaagaccctgtctcaaaaaaaaaaaaaaacaacaaaaacttagaattgaggagttgtacctccattggcttcctcactccaaaataggtgctgatccttcctattcctattctttgccaccttttgggtgtggtgtcaccagcctgtttagccaagtagctttgggcataggctgcccaatctgagcaaacaccagtgaggctctattgagccaagaccaagtcctcaaagcacctgaaccactgtggccttctcagcctacagcagtgtggtctcttacatggccacaaagggacacacagtgacaaaaggctcggaatgttacaatggtaaaatgagtgatctcaaatccactgacagatataaaataggcttagagaggaaaagctgcctctggtcaagtagatcatggcagcatgaattccaactcacttttttacaactccaacttctatgtttatctttgttactttcacttttttacaacctggccagaggcattttttaaatcaggcccaatatcagtattctttttgtgtgtgccaattttgttatcacatccctatgaagttgaaaaataaagttaattttgaccaaaaaaaaaaaaaaaag

SEQ ID NO: 43 - DNA, 1820 bp, homo sapiens
ggggatgcaactaagttgctgagacaagggaagagagatgaggaaccagagcttgtagaaaccactttaatcatatccaggagtttgcaagaaacaggtgcttaacactaattcacctcctgaacaagaaaaatgggctgtgaccggaactgtgggctcatcgctggggctgtcattggtgctgtcctggctgtgtttggaggtattctaatgccagttggagacctgcttatccagaagacaattaaaaagcaagttgtcctcgaagaaggtacaattgcttttaaaaattgggttaaaacaggcacagaagtttacagacagttttggatctttgatgtgcaaaatccacaggaagtgatgatgaacagcagcaacattcaagttaagcaaagaggtccttatacgtacagagttcgttttctagccaaggaaaatgtaacccaggacgctgaggacaacacagtctctttcctgcagcccaatggtgccatcttcgaaccttcactatcagttggaacagaggctgacaacttcacagttctcaatctggctgtggcagctgcatcccatatctatcaaaatcaatttgttcaaatgatcctcaattcacttattaacaagtcaaaatcttctatgttccaagtcagaactttgagagaactgttatggggctatagggatccatttttgagtttggttccgtaccctgttactactacagttggtctgttttatccttacaacaatactgcagatggagtttataaagttttcaatggaaaagataacataagtaaagttgccataatcgacacatataaaggtaaaaggaatctgtcctattgggaaagtcactgcgacatgattaatggtacagatgcagcctcatttccaccttttgttgagaaaagccaggtattgcagttcttttcttctgatatttgcaggtcaatctatgctgtatttgaatccgacgttaatctgaaaggaatccctgtgtatagattcgttcttccatccaaggcctttgcctctccagttgaaaacccagacaactattgtttctgcacagaaaaaattatctcaaaaaattgtacatcatatggtgtgctagacatcagcaaatgcaaagaagggagacctgtgtacatttcacttcctcattttctgtatgcaagtcctgatgtttcagaacctattgatggattaaacccaaatgaagaagaacataggacatacttggatattcaacctataactggattcactttacaatttgcaaaacggctgcaggtcaacctattggtcaagccatcagaaaaaattcaagtattaaagaatctgaagaggaactatattgtgcctattctttggcttaatgagactgggaccattggtgatgagaaggcaaacatgttcagaagtcaagtaactggaaaaataaacctccttggcctgatagaaatgatcttactcagtgttggtgtggtgatgtttgttgcttttatgatttcatattgtgcatgcagatcgaaaacaataaaataagtatgtaccaaaaaatattgcttcaataatattagcttatatattacttgttttcactttatcaaagagaagttacatattaggccatatatatttctagacatgtctagccactgatcatttttaaatataggtaaataaacctataaatattatcacgcagatcactaaagtatatctttaattctgggagaaatgagataaaagatgtacttgtgaccattgtaacaatagcacaataaagcactgtgccaaagttgtccaaaaaa

SEQ ID NO: 44 - DNA, 1663 bp, homo sapiens
gagatctggttgtttgaaagtgtgtagcacctccaccttctctctctctctccctctccctctcctgccagccaagtgaagacatgcttacttccccttcaccttccttcatgatgttaccattggaatgacatactgcatcctatagttataccatccactctgaaatcaatgtgaatttaacttcagttccatacagaaacttcttttccacaggtaagaaacggttgaactggatgcaatttttatcacagcttgtgtaagactgcctctgtccctcctctcacatgccattggttaaccagcagacagtgtgctcaggggcgttgccagctcattgctcttatagcctgtgagggaggaagaaacatttgctaaccaggccagtgacagaaatggattcgaaataccagtgtgtgaagctgaatgatggtcacttcatgcctgtcctgggatttggcacctatgcgcctgcagaggttcctaaaagtaaagctctagaggccgtcaaattggcaatagaagccgggttccaccatattgattctgcacatgtttacaataatgaggagcaggttggactggccatccgaagcaagattgcagatggcagtgtgaagagagaagacatattctacacttcaaagctttggagcaattcccatcgaccagagttggtccgaccagccttggaaaggtcactgaaaaatcttcaattggactatgttgacctctatcttattcattttccagtgtctgtaaagccaggtgaggaagtgatcccaaaagatgaaaatggaaaaatactatttgacacagtggatctctgtgccacatgggaggccatggagaagtgtaaagatgcaggattggccaagtccatcggggtgtccaacttcaaccacaggctgctggagatgatcctcaacaagccagggctcaagtacaagcctgtctgcaaccaggtggaatgtcatccttacttcaaccagagaaaactgctggatttctgcaagtcaaaagacattgttctggttgcctatagtgctctgggatcccatcgagaagaaccatgggtggacccgaactccccggtgctcttggaggacccagtcctttgtgccttggcaaaaaagcacaagcgaaccccagccctgattgccctgcgctaccagctgcagcgtggggttgtggtcctggccaagagctacaatgagcagcgcatcagacagaacgtgcaggtgtttgaattccagttgacttcagaggagatgaaagccatagatggcctaaacagaaatgtgcgatatttgacccttgatatttttgctggcccccctaattatccattttctgatgaatattaacatggagggcattgcatgaggtctgccagaaggccctgcgtgtggatggtgacacagaggatggctctatgctggtgactggacacatcgcctctggttaaatctctcctgcttggcgacttcagtaagctacagctaagcccatcggccggaaaagaaagacaataattttgtttttcattttgaaaaaattaaatgctctctcctaaagattcttcacctaaaaaaaaaaaaaaaaaaaaaaaaaaaaaaaaaaaaaaaaaaaaaaaaaaaaaaaaaaaaaaaaaaaaaaaaaa

SEQ ID NO: 45 - DNA, 503 bp, homo sapiens
cacctagcagttggttggcaaccccttcctcagtcccctgctgaaaaccctccagtcagcgcttatcccttctgctctctcccctcacccagagaaatacatggagtttgaccttaatggaaatggcgatattgatatcatgtccctgaaacgaatgctggagaaacttggagtccccaagactcacctagagctaaagaaattaattggagaggtgtccagtggctccggggagacgttcagctaccctgactttctcaggatgatgctgggcaagagatctgccatcctaaaaatgatcctgatgtatgaggaaaaagcgagagaaaaggaaaagccaacaggccccccagccaagaaagctatctctgagttgccctgatttgaagggaaaagggatgatgggattgaaggggcttctaatgacccagatatggaaacagaagacaaaattgtaagccagagtcaacaaattaaataaattaccccctcctccagatcaa

SEQ ID NO: 46 - DNA, 2518 bp, homo sapiens
cttcctccaggagtctctggtgcagctggggtggaatctggccaggccctgcttaggcccccatcctggggtcaggaaatttggaggataaggcccttcagccccaaggtcagcagggacgagcgggcagactggcgggtgtacaggagggctgggttgacctgtccttggtcactgaggccattggatcttcctccagtggctgccaggatttctggtggaagagacaggaaggcctcccccccttggtcgggtcagcctgggggctgagggcctggctgtcagccactcttcccagaacatatgtcatggcctcagtggctcatggggaagcaggggtgggcgagcttaggctagagcaagtcctgtgggagatggcagaggcctggtctgagaggcaactcggatgtgccctccagtggccatgctcccctccatgcgtctcccctgccctcctggagccctgcaggtcaatgtttaacagaaaccagagcagcggtggattaatgcgcaagggctcagccccccagccctgagcagtgggggaatcggagactttgcaacctgttctcagctctgcctcccctggccaggttgtcctcgaccagtcccgtgccatggcagcccacctgcttcccatctgcgccctcttcctgaccttactcgatatggcccaaggctttaggggccccttgctacccaaccggcccttcaccaccgtctggaatgcaaacacccagtggtgcctggagaggcacggtgtggacgtggatgtcagtgtcttcgatgtggtagccaacccagggcagaccttccgcggccctgacatgacaattttctatagctcccagctgggcacctacccctactacacgcccactggggagcctgtgtttggtggtctgccccagaatgccagcctgattgcccacctggcccgcacattccaggacatcctggctgccatacctgctcctgacttctcagggctggcagtcatcgactgggaggcatggcgcccacgctgggccttcaactgggacaccaaggacatttaccggcagcgctcacgggcactggtacaggcacagcaccctgattggccagctcctcaggtggaggcagtagcccaggaccagttccagggagctgcacgggcctggatggcaggcaccctccagctggggcgggcactgcgtcctcgcggcctctggggcttctatggcttccctgactgctacaactatgactttctaagccccaactacaccggccagtgcccatcaggcatccgtgcccaaaatgaccagctagggtggctgtggggccagagccgtgccctctatcccagcatctacatgcccgcagtgctggagggcacagggaagtcacagatgtatgtgcaacaccgtgtggccgaggcattccgtgtggctgtggctgctggtgaccccaatctgccggtgctgccctatgtccagatcttctatgacacgacaaaccactttctgcccctggatgagctggagcacagcctgggggagagtgcggcccagggggcagctggagtggtgctctgggtgagctgggaaaatacaagaaccaaggaatcatgtcaggccatcaaggagtatatggacactacactggggcccttcatcctgaacgtgaccagtggggcccttctctgcagtcaagccctgtgctccggccatggccgctgtgtccgccgcaccagccaccccaaagccctcctcctccttaaccctgccagtttctccatccagctcacgcctggtggtgggcccctgagcctgcggggtgccctctcacttgaagatcaggcacagatggctgtggagttcaaatgtcgatgctaccctggctggcaggcaccgtggtgtgagcggaagagcatgtggtgattggccacacactgagttgcacatattgagaacctaatgcactctgggtctggccagggcttcctcaaatacatgcacagtcatacaagtcatggtcacagtaaagagtacactcagccactgtcacaggcatattccctgcacacacatgcatacttacagactggaatagtggcataaggagttagaaccacagcagacaccattcattccatgtccatatgcatctacttggcaaggtcatagacaattcctccagagacactgagccagtctttgaactgcagcaatcacaaaggctgacattcactgagtgcctactctttgccaatccccgtgctaagcgttttatgtggacttattcattcctcacaatgaggctatgaggaaactgagtcactcacattgagagtaagcacgttgcccaaggttgcacagcaagaaaagggagaagttgagattcaaacccaggctgtctagctccgggggtacagcccttgcactcctactgagtttgtggtaaccagccctgcacgacccctgaatctgctgagaggcaccagtccagcaaataaagcagtcatgatttactt

SEQ ID NO: 47 - DNA, 1310 bp, homo sapiens
gggaggagagaaaagccatggccgacaaggtcctgaaggagaagagaaagctgtttatccgttccatgggtgaaggtacaataaatggcttactggatgaattattacagacaagggtgctgaacaaggaagagatggagaaagtaaaacgtgaaaatgctacagttatggataagacccgagctttgattgactccgttattccgaaaggggcacaggcatgccaaatttgcatcacatacatttgtgaagaagacagttacctggcagggacgctgggactctcagcagctcctcaggcagtgcaggacaacccagctatgcccacatcctcaggctcagaagggaatgtcaagctttgctccctagaagaagctcaaaggatatggaaacaaaagtcggcagagatttatccaataatggacaagtcaagccgcacacgtcttgctctcattatctgcaatgaagaatttgacagtattcctagaagaactggagctgaggttgacatcacaggcatgacaatgctgctacaaaatctggggtacagcgtagatgtgaaaaaaaatctcactgcttcggacatgactacagagctggaggcatttgcacaccgcccagagcacaagacctctgacagcacgttcctggtgttcatgtctcatggtattcgggaaggcatttgtgggaagaaacactctgagcaagtcccagatatactacaactcaatgcaatctttaacatgttgaataccaagaactgcccaagtttgaaggacaaaccgaaggtgatcatcatccaggcctgccgtggtgacagccctggtgtggtgtggtttaagattcagtaggagtttctggaaacctatctttaccaactacagaagagtttgaggatgatgctattaagaaagcccacatagagaaggattttatcgctttctgctcttccacaccagataatgtttcttggagacatcccacaatgggctctgtttttattggaagactcattgaacatatgcaagaatatgcctgttcctgtgatgtggaggaaattttccgcaaggttcgattttcatttgagcagccagatggtagagcgcagatgcccaccactgaaagagtgactttgacaagatgtttctacctcttcccaggacattaaaataaggaaactgtatgaatgtctgctgggcaggaagtgaagagatcgttctgtaaaaggtttttggaattatgtctgctgaataataaactttttttgaaataataaatctggtagaaaaatgaaaaaaaaaaaaaaaaaa

SEQ ID NO: 48 - DNA, 1584 bp, homo sapiens
aagctgtacactgcccaggcaaagcgtccgggcagcgtaggcgggcgactcagatcccagccagtggacttagcccctgtttgctcctccgataactggggtgaccttggttaatattcaccagcagcctcccccgttgcccctctggatccactgcttaaatacggacgaggacagggccctgtctcctcagcttcaggcaccaccactgacctgggacagtgaatcgacaatgccgtcttctgtctcgtggggcatcctcctgctggcaggcctgtgctgcctggtccctgtctccctggctgaggatccccagggagatgctgcccagaagacagatacatcccaccatgatcaggatcacccaaccttcaacaagatcacccccaacctggctgagttcgccttcagcctataccgccagctggcacaccagtccaacagcaccaatatcttcttctccccagtgagcatcgctacagcctttgcaatgctctccctggggaccaaggctgacactcacgatgaaatcctggagggcctgaatttcaacctcacggagattccggaggctcagatccatgaaggcttccaggaactcctccgtaccctcaaccagccagacagccagctccagctgaccaccggcaatggcttgttcctcagcgagggcctgaagctagtggataagtttttggaggatgttaaaaagttgtaccactcagaagccttcactgtcaacttcggggacaccgaagaggccaagaaacagatcaacgattacgtggagaagggtactcaagggaaaattgtggatttggtcaaggagcttgacagagacacagtttttgctctggtgaattacatcttctttaaaggcaaatgggagagaccctttgaagtcaaggacaccgaggaagaggacttccacgtggaccaggtgaccaccgtgaaggtgcctatgatgaagcgtttaggcatgtttaacatccagcactgtaagaagctgtccagctgggtgctgctgatgaaatacctgggcaatgccaccgccatcttcttcctgcctgatgaggggaaactacagcacctggaaaatgaactcacccacgatatcatcaccaagttcctggaaaatgaagacagaaggtctgccagcttacatttacccaaactgtccattactggaacctatgatctgaagagcgtcctgggtcaactgggcatcactaaggtcttcagcaatggggctgacctctccggggtcacagaggaggcacccctgaagctctccaaggccgtgcataaggctgtgctgaccatcgacgagaaagggactgaagctgctggggccatgtttttagaggccatacccatgtctatcccccccgaggtcaagttcaacaaaccctttgtcttcttaatgattgaccaaaataccaagtctcccctcttcatgggaaaagtggtgaatcccacccaaaaataactgcctctcgctcctcaacccctcccctccatccctggccccctccctggatgacattaaagaagggttgagctggaaaaaaaaaaaaaaaaaaa

SEQ ID NO: 49 - DNA, 1157 bp, homo sapiens
gctcacagtcatcaattatagaccccacaacatgcgccctgaagacagaatgttccatatcagagctgtgatcttgagagccctctccttggctttcctgctgagtctccgaggagctggggccatcaaggcggaccatgtgtcaacttatgccgcgtttgtacagacgcatagaccaacaggggagtttatgtttgaatttgatgaagatgagatgttctatgtggatctggacaagaaggagaccgtctggcatctggaggagtttggccaagccttttcctttgaggctcagggcgggctggctaacattgctatattgaacaacaacttgaataccttgatccagcgttccaaccacactcaggccaccaacgatccccctgaggtgaccgtgtttcccaaggagcctgtggagctgggccagcccaacaccctcatctgccacattgacaagttcttcccaccagtgctcaacgtcacgtggctgtgcaacggggagctggtcactgagggtgtcgctgagagcctcttcctgcccagaacagattacagcttccacaagttccattacctgacctttgtgccctcagcagaggacttctatgactgcagggtggagcactggggcttggaccagccgctcctcaagcactgggaggcccaagagccaatccagatgcctgagacaacggagactgtgctctgtgccctgggcctggtgctgggcctagtcggcatcatcgtgggcaccgtcctcatcataaagtctctgcgttctggccatgacccccgggcccaggggaccctgtgaaatactgtaaaggtgacaaaatatctgaacagaagaggacttaggagagatctgaactccagctgccctacaaactccatctcagcttttcttctcacttcatgtgaaaactactccagtggctgactgaattgctgacccttcaagctctgtccttatccattacctcaaagcagtcattccttagtaaagtttccaacaaatagaaattaatgacactttggtagcactaatatggagattatcctttcattgagccttttatcctctgttctcctttgaagaacccctcactgtcaccttcccgagaataccctaagaccaataaatacttcagtatttc

SEQ ID NO: 50 - DNA, 2116 bp, homo sapiens
atcagaaccaaattgctgagccagtcacctgtgttccaggagccgaatcagaaatgtcatcctcaggcacgccagacttacctgtcctactcaccgatttgaagattcaatatactaagatcttcataaacaatgaatggcatgattcagtgagtggcaagaaatttcctgtctttaatcctgcaactgaggaggagctctgccaggtagaagaaggagataaggaggatgttgacaaggcagtgaaggccgcaagacaggcttttcagattggatccccgtggcgtactatggatgcttccgagagggggcgactattatacaagttggctgatttaatcgaaagagatcgtctgctgctggcgacaatggagtcaatgaatggtggaaaactctattccaatgcatatctgaatgatttagcaggctgcatcaaaacattgcgctactgtgcaggttgggctgacaagatccagggccgtacaataccaattgatggaaatttttttacatatacaagacatgaacctattggtgtatgtggccaaatcattccttggaatttcccgttggttatgctcatttggaagatagggcctgcactgagctgtggaaacacagtggttgtcaaaccagcagagcaaactcctctcactgctctccacgtggcatctttaataaaagaggcagggtttcctcctggagtagtgaatattgttcctggttatgggcctacagcaggggcagccatttcttctcacatggatatagacaaagtagccttcacaggatcaacagaggttggcaagttgatcaaagaagctgccgggaaaagcaatctgaagagggtgaccctggagcttggaggaaagagcccttgcattgtgttagctgatgccgacttggacaatgctgttgaatttgcacaccatggggtattctaccaccagggccagtgttgtatagccgcatccaggatttttgtggaagaatcaatttatgatgagtttgttcgaaggagtgttgagcgggctaagaagtatatccttggaaatcctctgaccccaggagtcactcaaggccctcagattgacaaggaacaatatgataaaatacttgacctcattgagagtgggaagaaagaaggggccaaactggaatgtggaggaggcccgtgggggaataaaggctactttgtccagcccacagtgttctctaatgttacagatgagatgcgcattgccaaagaggagatttttggaccagtgcagcaaatcatgaagtttaaatctttagatgacgtgatcaaaagagcaaacaatactttctatggcttatcagcaggagtgtttaccaaagacattgataaagccataacaatctcctctgctctgcaggcaggaacagtgtgggtgaattgctatggcgtggtaagtgcccagtgcccctttggtggattcaagatgtctggaaatggaagagaactgggagagtacggtttccatgaatatacagaggtcaaaacagtcacagtgaaaatctctcagaagaactcataaagaaaatacaagagtggagagaagctcttcaatagctaagcatctccttacagtcactaatatagtagattttaaagacaaaatttttcttttcttgatttttttaaacataagctaaatcatattagtattaatactacccatagaaaacttgacatgtagcttcttctgaaagaattatttgccttctgaaatgtgacccccaagtcctatcctaaataaaaaaagacaaattcggatgtatgatctctctagctttgtcatagttatgtgattttcctttgtagctacttttgcaggataataattttatagaaaaggaacagttgcatttagcttctttcccttagtgactcttgaagtacttaacatacacgttaactgcagagtaaattgctctgttcccagtagttataaagtccttggactgttttgaaaagtttcctaggatgtcatgtctgcttgtcaaaagaaataatccctgtaatatttagctgtaaactgaatataaagcttaataaaaacaaccttgcatgaaaaaaaaaaaaaaaaaaaaa

SEQ ID NO: 51 - DNA, 7095 bp, homo sapiens
ccgggctgcgcggcgaggctgagccgggcccgggcgccggggccgggggcggctggcgcgggcaggaagcgcctcgcggacccgggcccgccccccgcctcccgccgcctccgggctcccggctcccggccgcgcctcgccccatgcactcgccgcgccgcgcagcccgcgcacgcccggatggctcctcgcgccgcgggcggcgcaccccttagcgcccgggccgccgccgccagccccccgccgttccagacgccgccgcggtgcccggtgccgctgctgttgctgctgctcctgggggcggcgcgggccggcgccctggagatccagcgtcggttcccctcgcccacgcccaccaacaacttcgccctggacggcgcggcggggaccgtgtacctggcggccgtcaaccgcctctatcagctgtcgggcgccaacctgagcctggaggccgaggcggccgtgggcccggtgcccgacagcccgctgtgtcacgctccgcagctgccgcaggcctcgtgcgagcacccgcggcgcctcacggacaactacaacaagatcctgcagctggaccccggccagggcctggtagtcgtgtgcgggtccatctaccagggcttctgccagctgcggcgccggggtaacatctcggccgtggccgtgcgcttcccgcccgccgcgccgcccgccgagcccgtcacggtgttccccagcatgctgaacgtggcggccaaccacccgaacgcgtccaccgtggggctagttctgcctcccgccgcgggcgcggggggcagccgcctgctcgtgggcgccacgtacaccggttacggcagctccttcttcccgcgcaaccgcagcctggaggaccaccgcttcgagaacacgcccgagatcgccatccgctccctggacacgcgcggcgacctggccaagctcttcaccttcgacctcaacccctccgacgacaacatcctcaagatcaagcagggcgccaaggagcagcacaagctgggcttcgtgagcgccttcctgcacccgtccgacccgccgccgggtgcacagtcctacgcgtacctggcgctcaacagcgaggcgcgcgcgggcgacaaggagagccaggcgcggagcctgctggcgcgcatctgcctgccccacggcgccggcggcgacgccaagaagctcaccgagtcctacatccagttgggcttgcagtgcgcgggcggcgcgggccgcggcgacctctacagccgcctggtgtcggtcttcccagcccgggagcggctctttgctgtcttcgagcggccccaggggtcccccgcggcccgcgctgctccggccgcactctgcgccttccgcttcgccgacgtgcgagccgccatccgagctgcgcgcaccgcctgcttcgtggaaccggcgcccgacgtggtggcggtgctcgacagcgtggtgcagggcacgggaccggcctgcgagcgcaagctcaacatccagctccagccagagcagctggactgtggagctgctcacctgcagcacccgctgtccatcctgcagcccctgaaggccacgcccgtgttccgcgccccgggcctcacctccgtggccgtggccagcgtcaacaactacacagcggtcttcctgggcacggtcaacgggaggcttctcaagatcaacctgaacgagagcatgcaggtggtgagcaggcgggtggtgactgtggcctatggggagcccgtgcaccatgtcatgcagtttgacccagcagactccgtttacctttacctgatgacgtcccaccagatggccagggtgaaggtcgccgcctgcaacgtgcactccacctgtggggactgcgtgggtgcggcggacgcctactgcggctggtgtgccctggagacgcggtgcaccttgcagcaggactgcaccaattccagccagcagcatttctggaccagtgccagcgagggccccagccgctgtcctgccatgaccgtcctgccttccgagatcgatgtgcgccaggagtacccaggcatgatcctgcagatctcgggcagcctgcccagcctcagtggcatggagatggcctgtgactatgggaacaacatccgcactgtggctcgggtcccaggccctgcctttggtcaccagattgcctactgcaacctcctgccgagggaccagtttccgcccttcccccccaaccaggaccacgtgactgttgagatgtctgtgagggtcaatgggcggaacatcgtcaaggccaatttcaccatctacgactgcagccgcactgcacaagtgtacccccacacagcctgtaccagctgcctgtcggcacagtggccctgtttctggtgcagccagcagcactcctgtgtttccaaccagtctcggtgcgaggcctcaccaaaccccacgagccctcaggactgcccccggaccctgctctcacccctggcacccgtgcctacgggtggctcccagaacatcctggtgcctctggccaacactgcctttttccagggtgcagccctggagtgtagttttgggctggaggagatcttcgaggctgtgtgggtgaatgagtctgttgtacgctgtgaccaggtggtgctgcacacgacccggaagagccaggtgttcccgctcagcctccaactaaaggggcggccagcccgattcctggacagccctgagcccatgacagtcatggtctataactgtgccatgggcagccccgactgttcccagtgcctgggccgcgaagacctgggtcacctgtgcatgtggagtgatggctgccgcctgcgggggcctctgcagcccatggctggcacctgccccgcccccgagatccgcgcgattgagcccctgagtggcccgttggacggtgggaccctgctgaccatccgaggaaggaacctgggccggcggctcagtgacgtggcccacggcgtgtggattggtggtgtggcctgtgagccactgcctgacagatacacggtgtcggaggagatcgtgtgtgtcacagggccagccccaggaccactctcaggtgtggtgaccgtgaacgcctctaaggagggcaagtcccgggaccgcttctcctacgtgctgcccctggtccactccctggagcctaccatgggccccaaggccgggggcaccaggatcaccatccatgggaatgacctccatgtaggctccgagctccaggtcctggtgaacgacacagacccctgcacggagctgatgcgcacagataccagcatcgcctgcaccatgcctgagggggccctgccggctccggtgcctgtgtgtgtgcgcttcgagcgtcggggctgcgtgcacggcaacctcaccttctggtacatgcagaacccggtcatcacggccatcagtccccgccgcagccctgtcagtggcggcaggaccatcacagtggctggtgagcgtttccacatggtgcagaatgtgtccatggccgtccaccacattggccgggagcccacgctctgcaaggttctcaactccaccctcatcacctgcccgtcccccggggccctgagcaacgcatcagcgccagtggacttcttcatcaatgggcgggcctacgcagacgaggtggctgtggctgaggagctactggaccccgaggaggcacagcggggcagcaggttccgcctggactacctccccaacccacagttctctacggccaagagggagaagtggatcaagcaccaccccggggagcctctcaccctcgttatccacaaggagcaggacagcctggggctccagagtcacgagtaccgggtcaagataggccaagtaagctgcgacatccagattgtctctgacagaatcatccactgctcggtcaacgagtccctgggcgcggccgtggggcagctgcccatcacaatccaggtagggaacttcaaccagaccatcgccacactgcagctggggggtagcgagacggccatcatcgtgtccatcgtcatctgcagcgtcctgctgctgctctccgtggtggccctgttcgtcttctgtaccaagagccgacgtgctgagcgttactggcagaagacgctgctgcagatggaggagatggaatctcagatccgagaggaaatccgcaaaggcttcgctgagctgcagacagacatgacagatctcaccaaggagctgaaccgcagccagggcatccccttcctggagtataagcacttcgtgacccgcaccttcttccccaagtgttcctccctttatgaagagcgttacgtgctgccctcccagaccctcaactcccagggcagctcccaggcacaggaaacccacccactgctgggagagtggaagattcctgagagctgccggcccaacatggaagagggaattagcttgttctcctcactactcaacaacaagcacttcctcatcgtctttgtccacgcgctggagcagcagaaggactttgcggtgcgcgacaggtgcagcctggcctcgctgctgaccatcgcgctgcacggcaagctggagtactacaccagcatcatgaaggagctgctggtggacctcattgacgcctcggccgccaagaaccccaagctcatgctgcggcgcacagagtctgtggtggagaagatgctcaccaactggatgtccatctgcatgtacagctgtctgcgggagacggtgggggagccattcttcctgctgctgtgtgccatcaagcagcaaatcaacaagggctccatcgacgccatcacaggcaaggcccgctacacactcaatgaggagtggctgctgcgggagaacatcgaggccaagccccggaacctgaacgtgtccttccagggctgtggcatggactcgctgagcgtgcgggccatggacaccgacacgctgacacaggtcaaggagaagatcctggaggccttctgcaagaatgtgccctactcccagtggccgcgtgcagaggacgtcgaccttgagtggttcgcctccagcacacagagctacatccttcgggacctggacgacacctcagtggtggaagacggccgcaagaagcttaacacgctggcccattacaagatccctgaaggtgcctccctggccatgagtctcatagacaagaaggacaacacactgggccgagtgaaagacttggacacagagaagtatttccatttggtgctgcctacggacgagctggcggagcccaagaagtctcaccggcagagccatcgcaagaaggtgctcccggaaatctacctgacccgcctgctctccaccaagggcacgttgcagaagtttctggatgacctgttcaaggccattctgagtatccgtgaagacaagcccccactggctgtcaagtactttttcgacttcctggaggagcaggctgagaagaggggaatctccgaccccgacaccctacacatctggaagaccaacagccttcctctccggttctgggtgaacatcctgaagaacccccagtttgtctttgacatcgacaagacagaccacatcgacgcctgcctttcagtcatcgcgcaggccttcatcgacgcctgctccatctctgacctgcagctgggcaaggattcgccaaccaacaagctcctctacgccaaggagattcctgagtaccggaagatcgtgcagcgctactacaagcagatccaggacatgacgccgctcagcgagcaagagatgaatgcccatctggccgaggagtcgaggaaataccagaatgagttcaacaccaatgtggccatggcagagatttataagtacgccaagaggtatcggccgcagatcatggccgcgctggaggccaaccccacggcccggaggacacaactgcagcacaagtttgagcaggtggtggctttgatggaggacaacatctacgagtgctacagtgaggcctgagacacatggagagttggtcaggctgctgctgggagaaatggacgcccactgggcctcaacttgatcttctaccccgtgcctgtgactcagactgggaaatactgagcagagacggctggggcgggggcaggaggaggggctgctctctgagacaggggcgcccccgccttgacccctgggcacctccatcccctcccacctgtccccagatcagtctctgggatggaggccagagagctggtcaggctcccccatctgcccagcacggcctgcactgtgcccacccacttgctccacaacgtccagttggtcctgctgccaagagccccgtgcatccaggcggccaagcacaaactgggggagaggaggccgccagcccggaggctgcagcccagaaactctacctcatccacactggtgcagggagccctccttgaactgacctttgattggtttctgcttcaactaccaaaatgttatctccacttccccctcacccgtagaggatcctggccacagacagtttcaagtagtgtcagatttttgttgcttgggcggctgttggtagagtgggcagtgcccgcgccatggggtgctctgtgggcttctccaggagcagggagggtggaggggagggatggggggcacaggagctgggagccccgtctccaggaaaaggagaggggttaagatgcaccgaggctgtagctgggctacttgatcttgctgaaagtgtttctaaagatagcaccacttttttttttaaagcttttatatattaaaaaacgtatcatgcaccaactgtgaatagctgccgcttgcgcagaggacccggggaggggtcccgagaggctccccatgcaacactggaaatgactgttccagagagcgggcagacctggcagagcgcccctggcgcctgagactaccacccactccgttcctgccagaaacgaccctctgtggccgatgggccatgcgggcccctcgcagccaactcagccagtgttgggactggctcagagcccatgggggctggaggggggcagctgggactctggaatcttctttataataaaagccttacggacaaacctactgtgggctccagcgtttgtcctgagatagccaagcggg

SEQ ID NO: 52 - DNA, 6846 bp, homo sapiens
ctgtgcaacggggtcaacgactgtggtgacaacagcgacgaaagcccacagcagaattgccggccccggacgggtgaggagaactgcaatgttaacaacggtggctgtgcccagaagtgccagatggtgcggggggcagtgcagtgtacctgccacacaggctaccggctcacagaggatgggcacacgtgccaagatgtgaatgaatgtgccgaggaggggtattgcagccagggctgcaccaacagcgaaggggctttccaatgctggtgtgaaacaggctatgaactacggcccgaccggcgcagctgcaaggctctggggccagagcctgtgctgctgttcgccaatcgcatcgacatccggcaggtgctgccacaccgctctgagtacacactgctgcttaacaacctggagaatgccattgcccttgatttccaccaccgccgcgagcttgtcttctggtcagatgtcaccctggaccggatcctccgtgccaacctcaacggcagcaacgtggaggaggttgtgtctactgggctggagagcccagggggcctggctgtggattgggtccatgacaaactctactggaccgactcaggcacctcgaggattgaggtggccaatctggacggggcccaccggaaggtgttgctgtggcagaacctggagaagccccgggccattgccttgcatcccatggagggtaccatttactggacagactggggcaacaccccccgtattgaggcctccagcatggatggctctggacgccgcatcattgccgatacccatctcttctggcccaatggcctcaccatcgactatgccgggcgccgtatgtactgggtggatgctaagcaccatgtcatcgagagggccaatctggatgggagtcaccgtaaggctgtcattagccagggcctcccgcatcccttcgccatcacagtgtttgaagacagcctgtactggacagactggcacaccaagagcatcaatagcgctaacaaatttacggggaagaaccaggaaatcattcgcaacaaactccacttccctatggacatccacaccttgcacccccagcgccaacctgcagggaaaaaccgctgtggggacaacaacggaggctgcacgcacctgtgtctgcccagtggccagaactacacctgtgcctgccccactggcttccgcaagatcagcagccacgcctgtgcccagagtcttgacaagttcctgctttttgcccgaaggatggacatccgtcgaatcagctttgacacagaggacctgtctgatgatgtcatcccactggctgacgtgcgcagtgctgtggcccttgactgggactcccgggatgaccacgtgtactggacagatgtcagcactgataccatcagcagggccaagtgggatggaacaggacaggaggtggtagtggataccagtttggagagcccagctggcctggccattgattgggtcaccaacaaactgtactggacagatgcaggtacagaccggattgaagtagccaacacagatggcagcatgagaacagtactcatctgggagaaccttgatcgtcctcgggacatcgtggtggaacccatgggcgggtacatgtattggactgactggggtgcgagccccaagattgaacgagctggcatggatgcctcaggccgccaagtcattatctcttctaatctgacctggcctaatgggttagctattgattatgggtcccagcgtctatactgggctgacgccggcatgaagacaattgaatttgctggactggatggcagtaagaggaaggtgctgattggaagccagctcccccacccatttgggctgaccctctatggagagcgcatctattggactgactggcagaccaagagcatacagagcgctgaccggctgacagggctggaccgggagactctgcaggagaacctggaaaacctaatggacatccatgtcttccaccgccgccggcccccagtgtctacaccatgtgctatggagaatggcggctgtagccacctgtgtcttaggtccccaaatccaagcggattcagctgtacctgccccacaggcatcaacctgctgtctgatggcaagacctgctcaccaggcatgaacagtttcctcatcttcgccaggaggatagacattcgcatggtctccctggacatcccttattttgctgatgtggtggtaccaatcaacattaccatgaagaacaccattgccgttggagtagacccccaggaaggaaaggtgtactggtctgacagcacactgcacaggatcagtcgtgccaatctggatggctcacagcatgaggacatcatcaccacagggctacagaccacagatgggctcgcggttgatgccattggccggaaagtatactggacagacacgggaacaaaccggattgaagtgggcaacctggacgggtccatgcggaaagtgttggtgtggcagaaccttgacagtccccgggccatcgtactgtaccatgagatggggtttatgtactggacagactggggggagaatgccaagttagagcggtccggaatggatggctcagaccgcgcggtgctcatcaacaacaacctaggatggcccaatggactgactgtggacaaggccagctcccaactgctatgggccgatgcccacaccgagcgaattgaggctgctgacctgaatggtgccaatcggcatacattggtgtcaccggtgcagcacccatatggcctcaccctgctcgactcctatatctactggactgactggcagactcggagcatccaccgtgctgacaagggtactggcagcaatgtcatcctcgtgaggtccaacctgccaggcctcatggacatgcaggctgtggaccgggcacagccactaggttttaacaagtgcggctcgagaaatggcggctgctcccacctctgcttgcctcggccttctggcttctcctgtgcctgccccactggcatccagctgaagggagatgggaagacctgtgatccctctcctgagacctacctgctcttctccagccgtggctccatccggcgtatctcactggacaccagtgaccacaccgatgtgcatgtccctgttcctgagctcaacaatgtcatctccctggactatgacagcgtggatggaaaggtctattacacagatgtgttcctggatgttatcaggcgagcagacctgaacggcagcaacatggagacagtgatcgggcgagggctgaagaccactgacgggctggcagtggactgggtggccaggaacctgtactggacagacacaggtcgaaataccattgaggcgtccaggctggatggttcctgccgcaaagtactgatcaacaatagcctggatgagccccgggccattgctgttttccccaggaaggggtacctcttctggacagactggggccacattgccaagatcgaacgggcaaacttggatggttctgagcggaaggtcctcatcaacacagacctgggttggcccaatggccttaccctggactatgatacccgcaggatctactgggtggatgcgcatctggaccggatcgagagtgctgacctcaatgggaaactgcggcaggtcttggtcggccatgtgtcccacccctttgccctcacacagcaagacaggtggatctactggacagactggcagaccaagtcaatccagcgtgttgacaaatactcaggccggaacaaggagacagtgctggcaaatgtggaaggactcatggatatcatcgtggtttcccctcagcggcagacagggaccaatgcctgtggtgtgaacaatggtggctgcacccacctctgctttgccagagcctcggacttcgtatgtgcctgtcctgacgaacctgatagccagccctgctcccttgtgcctggcctggtaccaccagctcctagggctactggcatgagtgaaaagagcccagtgctacccaacacaccacctaccaccttgtattcttcaaccacccggacccgcacgtctctggaggaggtggaaggaagatgctctgaaagggatgccaggctgggcctctgtgcacgttccaatgacgctgttcctgctgctccaggggaaggacttcatatcagctacgccattggtggactcctcagtattctgctgattttggtggtgattgcagctttgatgctgtacagacacaaaaaatccaagttcactgatcctggaatggggaacctcacctacagcaacccctcctaccgaacatccacacaggaagtgaagattgaagcaatccccaaaccagccatgtacaaccagctgtgctataagaaagagggagggcctgaccataactacaccaaggagaagatcaagatcgtagagggaatctgcctcctgtctggggatgatgctgagtgggatgacctcaagcaactgcgaagctcacgggggggcctcctccgggatcatgtatgcatgaagacagacacggtgtccatccaggccagctctggctccctggatgacacagagatggagcagctgttacaggaagagcagtctgagtgtagcagcgtccatactgcagccactccagaaagacgaggctctctgccagacacgggctggaaacatgaacgcaagctctcctcagagagccaggtctaaatgcccacattctcttccctgcctgcctgttccttctcctttatggacgtctagtccttgtgctcgcttacaccgcaggccccgcttctgtgtgcttgtcctcctcctcctcccaccccataactgttcctaagccttcaccggagctgtttaccacgtgagtccataactacctgtgcacaagaaatgatggcacatcacgagaatttagacctggattttaccatgaacctcacatcttgtactccatcctgggccccctgaaactgcttattcgtgattcctcaccagcgtagagctccacctcccctttccccagtaccctcagtgcctgcttctcagtgctgatgcagctgatgacccaggactgcgctctgccccatcacagccagcatgactgcttctctgagagaacttgcccatcaggggctgggacatgggggtgtgggtaaagacagggatgaaggatagaggctgagagaagaaggaagaatcagcccagcaggtatgggcatctgggaaacctccagcctcaagtgtgttggtaacatgaaaaagctctggggggtagttggatctgggtgtctggtccattgctggcagtggacattattcttgccctaagagacactgccttttcagcagcagatactggtgagatgggggtggctcaggctgttcttcctcctcctagaatgtctggagctgtttctacattcagataactgggtcccctatcacaaggctactggctaataggaattccctcctggtgccaccactggccagtacctttcctaagtctttgctcaaattaaccaggttgtgagccagtggcttgagtgaatgttaggccttgggggctgagtctctgaaaagtctaagaagctctgcctagaccaaatatggtatacctcctgacccctctctccctcatgtcctgggattctggggaagagacctagaaacaagctttcaaagaaaaaccagaagttgtcataaatggtcagaaagaacgatcaggttggagacttgggaaacccagggcctaaagagaagtatccatgagggtcaaacttcctgttgaacttcctatgttctttctcaagtgctcagggatctaagttagtggacagcaagcctgtggctacggggtggtgatgttcctcttccagctgtcccctcagctaaggggcttagtttccatgtgggatgccatcacttggttcatgctcattcacacaaagggcacgtgtctcagcctggtatcagggaaattgagacttatttttgccctaaaacgtctccctagctgttcttcgtggggtttttttgtttgtttttttgcctaatttgctttttctgaccaagccttgtggcaccagcaatctccaaagtcctgtggtgggagggctgaataaataaaaatacaaagaggtgggtaaggagtaggaaggtagagagcaccactgatgaggccctcctagcccatggcagacccagacctcttctcccccaggaattagaagtggcaggagagaacaacaggggctgggaatggaggggagaatttctaggggaagtttcctgagttgaaacttctcctgtggttactggtattgagaaatcagctaccaaagtgaaaaaggacaagatcaattcttttctagtcagttctaagactgctagagagagataccaggcccttagccttgctctcagtagcgtcagccccagttctgagcctccccacattacacttaacaagcagtaaaggagtgagcactttgggtccttagactcatgtctggggaggaagagcaagtagaaaagtggcattttcttgattggaaagggggaaggatcttattgcacttgggctgttcagaatgtagaaaggacatatttgaggaagtatctatttgagcactgatttactctgtaaaaagcaaaatctctctgtcctaaactaatggaagcgattctcccatgctcatgtgtaatggttttaacgttactcactggagagattggactttctggagttatttaaccactatgttcagtattttaggactttatgataatttaatataaatttagcttttcttaatc

SEQ ID NO: 53 - DNA, 7692 bp, homo sapiens
atggtcggggaacggcatgctggggacctcatggtgcccttggggcctcggctgcaggcatatcctgaagaactcattcgacagaggcctgggcatgacgggcatcctgaatacctgatccgatggagtgtcctgaagtgtggggaagtgggcaaagtgggtgtggaagaaggcaaagcagagcacatcctcatgtggctgtcggctcctgaggtctacgccaactgccctgggctgttaggtgagcgggcactatctaagggacttcagcacgaaccagctggggtttcaggaagctttcctcgagatccaggaggcctggatgaagtggcaatgggagagatggaggctgatgttcaggcgctggtacgcagggcggccaggcagctggcagaaagtgggaccccaagcctcacggccgctgtgcttcacaccatccacgtgctcagtgcctacgccagcatcgggcccctcactggtgtcttcagggagacaggagccctggacctgctcatgcacatgttatgcaatcctgagcctcagatccgccggagtgcaggcaaaatgctgcaggctctggcagcccacgatgctgggagtcgggctcacgtccttctatcactgagccagcaagatggcatcgagcagcacatggattttgacagtcgctatacattgctggagctgtttgcagaaaccacatcctctgaagaacactgcatggcctttgagggcattcatctgcctcagatcccaggaaagctgcttttctccttggtgaagcgctacctttgtgtcacgtccctcctggatcagctgaatagcagtccagagctgggagctggagaccaaagctccccatgtgccacaagagagaaaagccggggacagcgggaactggagttcagcatggctgtgggcaacctcatctctgagcttgtgcggagcatgggctgggcccggaacctcagcgaacagggcatgtcacctccccggccaacccggtccatctttcagccctacatttcaggccccagccttttactccccaccattgtcaccacccccagaagacaagggtgggtcttccgccagcgctctgaattctccagccgtagtggctatggagaatatgtgcagcagacactccagccagggatgcgagtgcggatgctggatgattatgaggagatcagtgctggggacgagggcgagttccggcagagcaacaacggcattccccctgtgcaggttttctggcagtcgacaggccgcacttactgggtgcactggcacatgctggagatcctgggccctgaggaagccactgaggataaggcttcagcagctgtggagaagggggcaggggctactgtgttgggcacagcatttccctcctgggactggaatcctatggatgggctgtaccctttgccgtacctccagcccgaacctcagaagaatgagagagtgggatatctgacccaggctgaatggtgggagctgcttttctttatcaaaaagttggacttgtgtgagcagcagccaattttccagaatctttggaagaacctggatgagaccctgggtgaaaaggccctaggtgagatctctgtgtccgtggaaatggccgagagtctgctgcaggttctcagtagtcgatttgagggcagcactctcaatgacctgctcaactcccagatctacaccaagtatgggctgctgtctaatgaaccaagcagctcgtctacttcacgaaatcactcctgtaccccagatccagaagaggagtccaagtcggaggccagcttctcagaggaagagactgagtccctcaaagcaaaggccgaggcccctaagacagaggccgagcccaccaagacaaggaccgagacccccatggcacagagtgattctcagctgtttaaccagcttctggtgactgaggggatgaccctgcccactgagatgaaggaggcagccagtgaaatggccagagccttgcggggtcccggtcctcgcagctccctggatcagcatgtggcagcggtcgtggccactgtgcagatatccagcttggacacaaacctgcagctttcagggctctctgccctctctcaggctgtggaggaggtcactgagcgggaccaccctctggtccgtcctgacagatcgctgagagagaagctagtgaagatgctggtggagctgctgaccaaccaggtgggagagaagatggtggtcgtgcaggccctgcgcctcctttacctgctcatgaccaagcacgagtggcggccgctctttgccagggagggtggcatctatgctgtgctggtctgcatgcaagaatataagacttctgtcttggtgcagcaggctgggctggcggcactgaagatgctggccgtcgccagctcctcggagatccccacttttgttactggccgagattctatccactctttgtttgatgctcagatgaccagagagatcttcgccagcatcgactcagccacacgcccgggctctgagagcctgctcctcactgtccctgcagccgtgatcctgatgctgaatactgaggggtgctcttctgcagcgagaaatggcttactcctgctcaacctacttttgtgcaacaccacactctgggagaccagattataacccaagagctgagagacacgttgtttaggcactcagggatagcaccaagaacagaacctatgcctaccacacgcaccatcctcatgatgcttctcaatcgctactcagagccgccgggcagccctgagcgtgcagcactagagacccccatcatccagggtcaggatgggtcccctgagctactgattcgatccctggttgggggcccatctgcagaactactcctggacttggagcgtgtgctgtgccgtgagggcagccccggaggtgccgtgaggcccctcctcaagcgcctccagcaggagacccagcctttcctcctgttgctgcggactctggatgctccggggcccaacaagactctgctgctgtctgtgctgagggtcataacccgactgctggatttccctgaggcaatggtcctcccctggcacgaggtcttggagccctgcctcaactgcctgagtggccctagcagtgactccgagattgttcaggagctgacctgcttcctacatcgcctggcctcgatgcataaggactatgctgtggtgctctgctgcctgggagcaaaagagatcctctccaaagtcctggacaagcactcagctcagctgctgctgggctgtgagcttcgggacctggtgacagagtgtgagaagtacgcacagctctatagcaacctcacctccagcatcctggccggctgcattcagatggtgctgggccagatcgaagaccacagacgaacccaccaacccatcaatatccccttctttgatgtgttcctcaggcatctctgccagggctccagtgtggaagtgaaggaggacaagtgctgggagaaggtggaggtgtcctccaacccgcaccgagccagcaagctgacggaccacaaccccaagacctactgggagtccaacggcagcaccggctcccactacatcaccctgcacatgcaccgtggtgttcttgttaggcagctcactttgctggtggccagtgaggactcaagctacatgccagccagggtggtggtgtttgggggtgacagcaccagctgcatcggcactgagctcaacacggtgaatgtgatgccctctgccagccgggtgatcctcttggagaacctgaaccgcttctggcccatcatccagatccgcataaagcgctgccagcagggcggcattgacacccgggttcggggtgtggaggtcctgggccctaagcccacattctggccactgttccgggagcagctgtgtcgccgaacatgtctcttctacacaattcgggcacaagcctggagccgggacatagcagaggaccaccggcgcctcctccagctctgtcccagactgaacagggttttgcgccacgagcagaattttgctgaccgcttcctccctgatgatgaggccgcccaggcactgggcaagacctgctgggaggccctggtcagccccctggtgcagaacatcacctctcccgatgcggaaggcgtgagtgccctgggatggctgctggatcagtacttagaacagagagagacctctcggaaccccttgagtcgagcagcgtcctttgcttctcgagttcgtcgcctttgccacttgctggtgcatgtggaacctcctcctgggccttctcctgagccatccactcggcccttcagcaagaacagcaagggtcgggaccggagcccggcgccttcgccagtgcttccaagcagcagcctgaggaacataacccagtgctggctgagcgtggtgcaggagcaggtcagcagattcctggctgcagcttggagggccccagactttgtgcctcgttactgtaaactctatgagcacttgcagagagcaggctccgagctgtttgggcctcgggcagccttcatgctggctctgcgcagtggcttctctggcgccttgctgcagcagtccttcctcactgctgctcacatgagtgagcagtttgccaggtacattgaccaacagatccagggtggcctgattggtggagcccctggagtggaaatgctggggcagcttcagcggcacctggaacccattatggtcctttctggtctggaactggccacaacttttgagcacttctatcagcattatatggcggaccgtctcctgagctttggttcgagctggctggagggggctgtgctagagcagattggcctctgttttcccaaccgcctcccacagctgatgctgcagagcctgagcacctctgaggagctgcagcgccagttccacctcttccagctccagcggctcgacaagttgttcttggagcaggaagatgaggaggaaaagagactagaggaagaggaggaggaagaggaggaagaggaagctgagaaagaattatttatcgaagatccaagtccagccatttctatactggtcctgtcaccacgctgctggcccgtctccccactctgctacctgtaccatcccagaaagtgccttcccacagaattctgtgatgcccttgaccgtttctccagtttctacagccagagtcagaaccatccagtcctggacatgggaccacatcggcgactgcagtggacgtggctgggccgggctgagctgcagtttgggaagcagatactgcatgtgtccaccgtgcagatgtggctgctgctgaaattcaatcagacagaggaggtgtcagtagagaccttgctgaaggattctgacctctccccagagctgctgctccaggcactcgtgcccctcacctcagggaatggccctttgaccctgcatgagggccaggactttccacacgggggtgtgctgcggcttcatgagcctgggccccagcgcagtggggaggccctgtggctgatacctccccaggcatacctgaacgtagagaaggatgaaggccgaaccctggaacagaagaggaatctcttgagctgtcttcttgttcgtattctcaaagcccatggggaaaagggcctccacattgatcagctggtttgtctggtgctggaggcctggcagaagggtccaaatcctcctggaaccctgggccacactgttgctgggggtgtggcctgtaccagtacagatgtcctctcttgcatcctgcacctcttaggccagggctacgtgaaacggcgtgatgaccggccccagatcctgatgtatgccgctccagagcccatggggccctgccggggtcaggcagatgtccctttctgtggcagccagagcgaaacctccaagcccagcccagaagctgtggctaccctggcatctctacagctgcctgcaggccgcaccatgagcccccaggaagtagaagggttgatgaagcagacggtgcgtcaggtgcaggagacgctgaacttagagccagatgtcgctcagcaccttttggctcattcccactggggcgctgaacagctgctgcagagctacagtgaggaccctgagccactgctgctggcagctgggctgtgcgtacaccaggctggctgtacccgtacggcctgaccactgccccgtctgtgtgagccccctggggtgtgacgacgacctgccctctctctgctgcatgcactattgctgtaagtcttgctggaatgagtacctgacaactcggatcgagcagaaccttgttttgaattgcacctgccccattgccgactgccccgcccagcccaccggagccttcattcgtgccatcgtctcctcgccagaggtcatctccaagtatgagaaggcgctcctgcgtggctatgtggagagctgctccaacctgacctggtgcaccaacccccagggctgcgaccgcatcctgtgccgccagggcctgggctgtgggaccacctgctccaagtgtggctgggcctcttgcttcaactgtagcttccctgaggcacactaccctgctagctgtggccatatgtctcagtgggtcgatgacggtggctactatgacggcatgagcgtggaggcgcagagcaagcacctggccaagctcatctccaagcgctgtcccagctgtcaggctcccatcgagaagaacgaggggtgcctgcacatgacctgtgccaaatgtaaccatggattctgctggcgctgcctcaagtcctggaagccaaatcacaaagactattacaactgctctgccatggtaagcaaggcagctcgccaggagaagcggtttcaggactataatgagaggtgcactttccatcaccaggcgcgggagtttgctgtgaacttgcggaaccgggtgtctgccatccatgaagtgcccccgcccagatccttcaccttcctcaatgatgcctgccagggactggagcaggctcggaaggtgctggcctacgcctgcgtgtacagcttctacagccaggacgcagagtacatggatgtggtggagcagcagacagagaacctggagctgcacaccaatgccctgcagatcctcctggaggaaaccctgctgcggtgcagagacctggcctcctccctgcgcctcctgcgggccgactgcctcagcacgggcatggagctgctccggcggatccaggagaggctgcttgccatcctgcagcattctgcccaggatttccgggttggtcttcagagtccatcagtagaggcctgggaggcaaaaggacccaacatgcctggcagtcagccccaggcctcctcagggccagaggcagaagaggaggaggaagacgatgaggatgatgtgcccgagtggcagcaggatgagtttgatgaggagctggacaatgacagcttctcctacgatgagtctgagaacctggaccaagagactttcttctttggtgatgaggaagaggatgaagatgaggcctatgactgagggggcagatgcaggaaacacctagagcagccccagagtcacggggctgagggggcgggagctgcccctgtcatagggagggggattcccagcgtctgtagtgcttcctgtttgctgaataaaggtctctttctcacacac

SEQ ID NO: 54 - DNA, 3501 bp, homo sapiens
ggccgggagctcgggagtcggccgccgcgccgaggttcgccccgttttgcagagagagccgagtcgggacctggaaagacgtccccgcggggctccggccgccgcgcctccccgccggcgcctgccctgccctgcccgtcccagccccgcggttcggggcgtgcggccgggacgcgcggagccccggccctgacccgctgcgccgggacgggacgctcctaacgccgccgtaccggtccgtggttgcagggtcgctccgcgcctttccgtcagtgagggtcggaaccccagctccagggctagcgcagtgtggccccaggccctcgcctccggtgcacgggaccccggacccccccaagcctctggcttcacgagaccccaaccttcagttggaacagcttggaacagcgcgagcgcccgggaagccctggccgggtcgtgcgctccgtgaggggtcctaggcgggcaggacagtcggaccgaaccgccgggctggtgccgcgagcccaggctgtcaccttcgtcccgcctcaggcgaggggttcagcgcctgccccgaagataacacaggggtccccttctgtcccggcggcccgcgagagccaaggctgcagctctcccagtgaagtgatatcactgcctctgtggacaagacacctccaggagcccagctcacagccaccggtaccttcttccaggacaagctgggggcctccatgggcgcctgagggccaggcgccagggccgtgggcacgagtatggtgagacaccagcccctgcgtactacgagccacagctgtgcctctcctgcctcacgggcatctacggctgccgttggaagcgctaccagcgctcccatgatgataccacaccgtgggagcgcctctggttcctgctcctcaccttcacctttggcctcacgctcacctggctttacttctggtgggaagtccacaatgactatgatgaattcaactggtacctctacaaccgcatgggctactggagcgactggcccgtacccatccttgtgaccacagctgctgccttcgcatacatcgctggcctcctggtcctggcactatgtcacattgccgtggggcagcagatgaacctgcactggctgcacaagatcgggctggtggtcatcctggcttccacggtggtggccatgtcggccgtggcccagctgtgggaggacgagtgggaggtgctgctgatctccctgcagggcacagcgccattcctgcatgtgggggctgtggcagcagtcaccatgctctcctggatcgtggcaggacagttcgcccgtgcagagcggacctcctcccaggtgaccattctctgtaccttcttcaccgtggtgtttgccctctacctggcccctctcaccatctcctctccctgcatcatggagaagaaagacctcggccccaagcctgctctcattggccaccgcggggcccccatgctggctccagagcacacgctcatgtccttccggaaggccctcgagcagaagctgtacgggctccaggctgacattaccatcagcctggacggcgtgcccttcctcatgcatgacaccaccctgcggcgcaccaccaacgtggaggaggagttcccggagctggcccgcaggcctgcctccatgcttaactggaccaccctgcagagactcaacgctggccagtggttcctgaagactgaccccttctggacagccagctccctgtcaccctccgaccacagagaggcccagaaccagtccatctgcagcctggcagagctcctggagctggccaagggcaatgccacactgctgctcaacctgcgtgacccgccccgggagcacccctaccgcagcagttttatcaacgtgactctggaggccgtgctgcactccggcttcccccagcaccaggtcatgtggctgcctagcaggcagaggcccctggtgcggaaggtggctcccggcttccaacagacatcaggctccaaggaggcagtcgccagcctgcggagaggccacatccagcggctgaacctgcgctacactcaggtgtcccgccaggagctcagggactacgcgtcctggaacctgagtgtgaacctctacacagtcaacgcaccgtggctcttctccctgctgtggtgtgcgggggtcccatccgtcacctctgacaactcccacaccctgtcccaggtgccttcccccctctggatcatgcccccggacgagtactgtctcatgtgggtcactgccgacctggtctccttcaccctcatcgtgggcatcttcgtgctccagaagtggcgcctgggtggcatacggagctacaaccctgagcagatcatgctgagtgctgcggtgcgccggaccagccgggacgtcagcatcatgaaggagaagcttattttctcagagatcagcgatggtgtagaggtctccgatgtgctctccgtatgttcagacaacagttatgacacatatgccaacagcaccgccacccctgtgggcccccgagggggtggcagccacaccaagaccctcatagagcggagtgggcgttagctgagacatgtctgtcccacctgtacctgacacagaagctggggagcctaggagagctggtggaagtgtgtctgaactcggagtgctctgggagcgggctccacagcctccttgtgggctccagccccttgtcagccgcagcctctcttgagggggactccctgtctcctgaggcccagctgggccaggactccatcctttcagatgcccctgcaggcctggggctccttctgggaagtatggggcctagggcttggtccccctcttctgaggccctctcctgtatcccgacctggaagctttgatgggtcatgggccatgccataccccctgtggcaatggagtgtgtggatgctcacctgtgccatctgtcctcctgtctgtgccaggaggcacctgagttctctgctgttatcctgccccaagggcctgggccgagcctctacctgaagcaactctgctcttcctgtcagtctcaaagcacaaggaggttcagcccaggaggaagccagctgcaatgtggagacacgtcctcctccccaacccacctcatgccaccgccaaccccctgccccaggagcgggcctgagccacgtcccctaggagcagctggagatggccaaaagagtgagctcaggactactggatcccatgcccaggtgtccagcagacctcaaggcagaagggtcacctaacccaggagtccacagactgatgtgacctcaggttcccacatcagtggccacagggcagggcccacctggtagaagtgttctggatatggccagggtgggtgtgtggctaagtgggcctgaacagagggaacctagggcccttggcaatgtgatttaaagctgccatcttgcggaaaaaaaaaaaaaaaaaaaaaaaaaaaaaaaaaaaaaaaaaaaaaaaaaaaaaaaaaa

SEQ ID NO: 55 - DNA, 1838 bp, homo sapiens
agcctggggagggacgcgggcggggacggagctcggcgtgcttgctgctggagggtgatggccctgcaaggctgtgggctccgacctcaccgggagtcgacagcgagaggttcgccgaagagcgaggttctgggcgagcgctgaacgccggccccaagcaccccgggtctttacacagtccgcgtccacagactctgacgaagacgtggatctgctctcgctttagctgctcgcggtcctccagatcatgtccgcgactcctgcgactccgcgcggaaaaaaaagtttgccaggcgtggactcaatgacctttccaagctgtgcgcctcgctgcctggaccgggtctgagcgcggctgcccaggttgacctttctgcgggagggctttctctacgtgctgttgtctcactgggtttttgtcggagccccacgccctccggcctctgattcctggaagaaagggttggtcccctcagcacccccagcatcccggaaaatggggagcaaggctctgccagcgcccatcccgctccacccgtcgctgcagctcaccaattactccttcctgcaggccgtgaacaccttcccggccacggtggaccacctgcagggcctgtacggtctcagcgcggtacagaccatgcacatgaaccactggacgctggggtatcccaatgtgcacgagatcacccgctccaccatcacggagatggcggcggcgcagggcctcgtggacgcgcgcttccccttcccggccctgccttttaccacccacctattccaccccaagcagggggccattgcccacgtcctcccagccctgcacaaggaccggccccgttttgactttgccaatttggcggtggctgccacgcaagaggatccgcctaagatgggagacctgagcaagctgagcccaggactgggtagccccatctcgggcctcagtaaattgactccggacagaaagccctctcgaggaaggttgccctccaaaacgaaaaaagagtttatctgcaagttttgcggcagacactttaccaaatcctacaatttgctcatccatgagaggacccacacggacgagaggccgtacacgtgtgacatctgccacaaggccttccggaggcaagatcacctgcgggatcacagatacatccattccaaagaaaaacccttcaaatgtcaggagtgtgggaaaggattttgtcagtctagaactctagcagttcacaaaactttacacatgcaggaatctccacacaaatgtcccacatgtggaagaacctttaatcagagaagtaatctgaaaactcaccttctcacccatacagacatcaagccctacagccgcgagcagtgcggcaaagtgttcaggcgaaactgtgatctgcggcggcacagcctgactcacaccccgcggcaggacttctagagaagcccaggatctgtcccgtgccgccgctgctcccctccccagacacctctccacgtctcctacccagggggtcgcatccctagcccttcactgaccccagctcttcccttgctgcagccgcacctgcagctccagggagttaactcttcttctgggggactgagaactgtagaaagccacacactactacatcccttcacaaagagtatatgctagtttcttgtagatattcacagctcattttagagctctgtacataatgttgtgggtctttgttttgttgttttgtttgctttgggatcttgttggatgcacttagatatggaaaatggaagccaaattttatctttaaagactgtattttcaaaataaaactttttcttgtttgtttcaaaactcc

SEQ ID NO: 56 - DNA, 1833 bp, homo sapiens
ggaggtgggaggagggagtgacgagtcaaggaggagacagggacgcaggagggtgcaaggaagtgtcttaactgagacgggggtaaggcaagagagggtggaggaaattctgcaggagacaggcttcctccagggtctggagaacccagaggcagctcctcctgagtgctgggaaggactctgggcatcttcagcccttcttactctctgaggctcaagccagaaattcaggctgcttgcagagtgggtgacagagccacggagctggtgtccctgggaccctctgcccgtcttctctccactccccagcatggaggaaggtggtgattttgacaactactatggggcagacaaccagtctgagtgtgagtacacagactggaaatcctcgggggccctcatccctgccatctacatgttggtcttcctcctgggcaccacgggcaacggtctggtgctctggaccgtgtttcggagcagccgggagaagaggcgctcagctgatatcttcattgctagcctggcggtggctgacctgaccttcgtggtgacgctgcccctgtgggctacctacacgtaccgggactatgactggccctttgggaccttcttctgcaagctcagcagctacctcatcttcgtcaacatgtacgccagcgtcttctgcctcaccggcctcagcttcgaccgctacctggccatcgtgaggccagtggccaatgctcggctgaggctgcgggtcagcggggccgtggccacggcagttctttgggtgctggccgccctcctggccatgcctgtcatggtgttacgcaccaccggggacttggagaacaccactaaggtgcagtgctacatggactactccatggtggccactgtgagctcagagtgggcctgggaggtgggccttggggtctcgtccaccaccgtgggctttgtggtgcccttcaccatcatgctgacctgttacttcttcatcgcccaaaccatcgctggccacttccgcaaggaacgcatcgagggcctgcggaagcggcgccggctgctcagcatcatcgtggtgctggtggtgacctttgccctgtgctggatgccctaccacctggtgaagacgctgtacatgctgggcagcctgctgcactggccctgtgactttgacctcttcctcatgaacatcttcccctactgcacctgcatcagctacgtcaacagctgcctcaaccccttcctctatgcctttttcgacccccgcttccgccaggcctgcacctccatgctctgctgtggccagagcaggtgcgcaggcacctcccacagcagcagtggggagaagtcagccagctactcttcggggcacagccaggggcccggccccaacatgggcaagggtggagaacagatgcacgagaaatccatcccctacagccaggagacccttgtggttgactagggctgggagcagagagaagcctggcgccctcggccctccccggcctttgcccttgctttctgaaaatcagagtcacctcctctgcccagagctgtcctcaaagcatccagtgaacactggaagaggcttctagaagggaagaaattgtccctctgaggccgccgtgggtgacctgcagagacttcctgcctggaactcatctgtgaactgggacagaagcagaggaggctgcctgctgtgatacccccttacctcccccagtgccttcttcagaatatctgcactgtcttctgatcctgttagtcactgtggttcatcaaataaaactgtttgtgcaactgttgtgtccaaaaaaaaaaaaaaaaaaaaaaaaaaaaaaa

SEQ ID NO: 57 - DNA, 1060 bp, homo sapiens
cgcgggccgactggtgtttatccgtcactcgccgaggttccttgggtcatggtgccagcctgactgagaagaggacgctcccgggagacgaatgaggaaccacctcctcctactgttcaagtacaggggcctggtccgcaaagggaagaaaagcaaaagacgaaaatggctaaattcgtgatccgcccagccactgccgccgactgcagtgacatactgcggctgatcaaggagctggctaaatatgaatacatggaagaacaagtaatcttaactgaaaaagatctgctagaagatggttttggagagcaccccttttaccactgcctggttgcagaagtgccgaaagagcactggactccggaaggacacagcattgttggttttgccatgtactattttacctatgacccgtggattggcaagttattgtatcttgaggacttcttcgtgatgagtgattatagaggctttggcataggatcagaaattctgaagaatctaagccaggttgcaatgaggtgtcgctgcagcagcatgcacttcttggtagcagaatggaatgaaccatccatcaacttctataaaagaagaggtgcttctgatctgtccagtgaagagggttggagactgttcaagatcgacaaggagtacttgctaaaaatggcaacagaggagtgaggagtgctgctgtagatgacaacctccattctattttagaataaattcccaacttctcttgctttctatgctgtttgtagtgaaataatagaatgagcacccattccaaagctttattaccagtggcgttgttgcatgtttgaaatgaggtctgtttaaagtggcaatctcagatgcagtttggagagtcagatctttctccttgaatatctttcgataaacaacaaggtggtgtgatcttaatatatttgaaaaaaacttcattctcgtgagtcatttaaatgtgtacaatgtacacactggtacttagagtttctgtttgattcttttttaataaactactctttgatttaaaaaaaaaaaaaaaaaaaaaaaaaaa

SEQ ID NO: 58 - DNA, 2318 bp, homo sapiens
gcacagaagcgagtccgactgtgctcgctgctcagcgccgcacccggaagatgaggctcgccgtgggagccctgctggtctgcgccgtcctggggctgtgtctggctgtccctgataaaactgtgagatggtgtgcagtgtcggagcatgaggccactaagtgccagagtttccgcgaccatatgaaaagcgtcattccatccgatggtcccagtgttgcttgtgtgaagaaagcctcctaccttgattgcatcagggccattgcggcaaacgaagcggatgctgtgacactggatgcaggtttggtgtatgatgcttacctggctcccaataacctgaagcctgtggtggcagagttctatgggtcaaaagaggatccacagactttctattatgctgttgctgtggtgaagaaggatagtggcttccagatgaaccagcttcgaggcaagaagtcctgccacacgggtctaggcaggtccgctgggtggaacatccccataggcttactttactgtgacttacctgagccacgtaaacctcttgagaaagcagtggccaatttcttctcgggcagctgtgccccttgtgcggatgggacggacttcccccagctgtgtcaactgtgtccagggtgtggctgctccacccttaaccaatacttcggctactcgggagccttcaagtgtctgaaggatggtgctggggatgtggcctttgtcaagcactcgactatatttgagaacttggcaaacaaggctgacagggaccagtatgagctgctttgcctggacaacacccggaagccggtagatgaatacaaggactgccacttggcccaggtcccttctcataccgtcgtggcccgaagtatgggcggcaaggaggacttgatctgggagcttctcaaccaggcccaggaacattttggcaaagacaaatcaaaagaattccaactattcagctctcctcatgggaaggacctgctgtttaaggactctgcccacgggtttttaaaagtcccccccaggatggatgccaagatgtacctgggctatgagtatgtcactgccatccggaatctacgggaaggcacatgcccagaagccccaacagatgaatgcaagcctgtgaagtggtgtgcgctgagccaccacgagaggctcaagtgtgatgagtggagtgttaacagtgtagggaaaatagagtgtgtatcagcagagaccaccgaagactgcatcgccaagatcatgaatggagaagctgatgccatgagcttggatggagggtttgtctacatagcgggcaagtgtggtctggtgcctgtcttggcagaaaactacaataagagcgataattgtgaggatacaccagaggcagggtattttgctgtagcagtggtgaagaaatcagcttctgacctcacctgggacaatctgaaaggcaagaagtcctgccatacggcagttggcagaaccgctggctggaacatccccatgggcctgctctacaataagatcaaccactgcagatttgatgaatttttcagtgaaggttgtgcccctgggtctaagaaagactccagtctctgtaagctgtgtatgggctcaggcctaaacctgtgtgaacccaacaacaaagagggatactacggctacacaggcgctttcaggtgtctggttgagaagggagatgtggcctttgtgaaacaccagactgtcccacagaacactgggggaaaaaaccctgatccatgggctaagaatctgaatgaaaaagactatgagttgctgtgccttgatggtaccaggaaacctgtggaggagtatgcgaactgccacctggccagagccccgaatcacgctgtggtcacacggaaagataaggaagcttgcgtccacaagatattacgtcaacagcagcacctatttggaagcaacgtaactgactgctcgggcaacttttgtttgttccggtcggaaaccaaggaccttctgttcagagatgacacagtatgtttggccaaacttcatgacagaaacacatatgaaaaatacttaggagaagaatatgtcaaggctgttggtaacctgagaaaatgctccacctcatcactcctggaagcctgcactttccgtagaccttaaaatctcagaggtagggctgccaccaaggtgaagatgggaacgcagatgatccatgagtttgccctggtttcactggcccaagtggtttgtgctaaccacgtctgtcttcacagctctgtgttgccatgtgtgctgaacaaaaaataaaaattattattgattttatatttc

SEQ ID NO: 59 - DNA, 5417 bp, homo sapiens
agaaggtagcagacagacagacggatctaacctctcttggatcctccagccatgaggctgctctgggggctgatctgggcatccagcttcttcaccttatctctgcagaagcccaggttgctcttgttctctccttctgtggttcatctgggggtccccctatcggtgggggtgcagctccaggatgtgccccgaggacaggtagtgaaaggatcagtgttcctgagaaacccatctcgtaataatgtcccctgctccccaaaggtggacttcacccttagctcagaaagagacttcgcactcctcagtctccaggtgcccttgaaagatgcgaagagctgtggcctccatcaactcctcagaggccctgaggtccagctggtggcccattcgccatggctaaaggactctctgtccagaacgacaaacatccagggtatcaacctgctcttctcctctcgccgggggcacctctttttgcagacggaccagcccatttacaaccctggccagcgggttcggtaccgggtctttgctctggatcagaagatgcgcccgagcactgacaccatcacagtcatggtggagaactctcacggcctccgcgtgcggaagaaggaggtgtacatgccctcgtccatcttccaggatgactttgtgatcccagacatctcagagccagggacctggaagatctcagcccgattctcagatggcctggaatccaacagcagcacccagtttgaggtgaagaaatatgtccttcccaactttgaggtgaagatcacccctggaaagccctacatcctgacggtgccaggccatcttgatgaaatgcagttagacatccaggccaggtacatctatgggaagccagtgcagggggtggcatatgtgcgctttgggctcctagatgaggatggtaagaagactttctttcgggggctggagagtcagaccaagctggtgaatggacagagccacatttccctctcaaaggcagagttccaggacgccctggagaagctgaatatgggcattactgacctccaggggctgcgcctctacgttgctgcagccatcattgagtctccaggtggggagatggaggaggcagagctcacatcctggtattttgtgtcatctcccttctccttggatcttagcaagaccaagcgacaccttgtgcctggggcccccttcctgctgcaggccttggtccgtgagatgtcaggctccccagcttctggcattcctgtcaaagtttctgccacggtgtcttctcctgggtctgttcctgaagcccaggacattcagcaaaacacagacgggagcggccaagtcagcattccaataattatccctcagaccatctcagagctgcagctctcagtatctgcaggctccccacatccagcgatagccaggctcactgtggcagccccaccttcaggaggccccgggtttctgtctattgagcggccggattctcgacctcctcgtgttggggacactctgaacctgaacttgcgagccgtgggcagtggggccaccttttctcattactactacatgatcctatcccgagggcagatcgtgttcatgaatcgagagcccaagaggaccctgacctcggtctcggtgtttgtggaccatcacctggcaccctccttctactttgtggccttctactaccatggagaccacccagtggccaactccctgcgagtggatgtccaggctggggcctgcgagggcaagctggagctcagcgtggacggtgccaagcagtaccggaacggggagtccgtgaagctccacttagaaaccgactccctagccctggtggcgctgggagccttggacacagctctgtatgctgcaggcagcaagtcccacaagcccctcaacatgggcaaggtctttgaagctatgaacagctatgacctcggctgtggtcctgggggtggggacagtgcccttcaggtgttccaggcagcgggcctggccttttctgatggagaccagtggaccttatccagaaagagactaagctgtcccaaggagaagacaacccggaaaaagagaaacgtgaacttccaaaaggcgattaatgagaaattgggtcagtatgcttccccgacagccaagcgctgctgccaggatggggtgacacgtctgcccatgatgcgttcctgcgagcagcgggcagcccgcgtgcagcagccggactgccgggagcccttcctgtcctgctgccaatttgctgagagtctgcgcaagaagagcagggacaagggccaggcgggcctccaacgagccctggagatcctgcaggaggaggacctgattgatgaggatgacattcccgtgcgcagcttcttcccagagaactggctctggagagtggaaacagtggaccgctttcaaatattgacactgtggctccccgactctctgaccacgtgggagatccatggcctgagcctgtccaaaaccaaaggcctatgtgtggccaccccagtccagctccgggtgttccgcgagttccacctgcacctccgcctgcccatgtctgtccgccgctttgagcagctggagctgcggcctgtcctctataactacctggataaaaacctgactgtgagcgtccacgtgtccccagtggaggggctgtgcctggctgggggcggagggctggcccagcaggtgctggtgcctgcgggctctgcccggcctgttgccttctctgtggtgcccacggcagccgccgctgtgtctctgaaggtggtggctcgagggtccttcgaattccctgtgggagatgcggtgtccaaggttctgcagattgagaaggaaggggccatccatagagaggagctggtctatgaactcaaccccttggaccaccgaggccggaccttggaaatacctggcaactctgatcccaatatgatccctgatggggactttaacagctacgtcagggttacagcctcagatccattggacactttaggctctgagggggccttgtcaccaggaggcgtggcctccctcttgaggcttcctcgaggctgtggggagcaaaccatgatctacttggctccgacactggctgcttcccgctacctggacaagacagagcagtggagcacactgcctcccgagaccaaggaccacgccgtggatctgatccagaaaggctacatgcggatccagcagtttcggaaggcggatggttcctatgcggcttggttgtcacgggacagcagcacctggctcacagcctttgtgttgaaggtcctgagtttggcccaggagcaggtaggaggctcgcctgagaaactgcaggagacatctaactggcttctgtcccagcagcaggctgacggctcgttccaggacccctgtccagtgttagacaggagcatgcaggggggtttggtgggcaatgatgagactgtggcactcacagcctttgtgaccatcgcccttcatcatgggctggccgtcttccaggatgagggtgcagagccattgaagcagagagtggaagcctccatctcaaaggcaaactcatttttgggggagaaagcaagtgctgggctcctgggtgcccacgcagctgccatcacggcctatgccctgtcactgaccaaggcgcctgtggacctgctcggtgttgcccacaacaacctcatggcaatggcccaggagactggagataacctgtactggggctcagtcactggttctcagagcaatgccgtgtcgcccaccccggctcctcgcaacccatccgaccccatgccccaggccccagccctgtggattgaaaccacagcctacgccctgctgcacctcctgcttcacgagggcaaagcagagatggcagaccaggcttcggcctggctcacccgtcagggcagcttccaagggggattccgcagtacccaagacacggtgattgccctggatgccctgtctgcctactggattgcctcccacaccactgaggagaggggtctcaatgtgactctcagctccacaggccggaatgggttcaagtcccacgcgctgcagctgaacaaccgccagattcgcggcctggaggaggagctgcagttttccttgggcagcaagatcaatgtgaaggtgggaggaaacagcaaaggaaccctgaaggtccttcgtacctacaatgtcctggacatgaagaacacgacctgccaggacctacagatagaagtgacagtcaaaggccacgtcgagtacacgatggaagcaaacgaggactatgagtacgatgagcttccagccaaggatgacccagatgcccctctgcagcccgtgacacccctgcagctgtttgagggtcggaggaaccgccgcaggagggaggcgcccaaggtggtggaggagcaggagtccagggtgcactacaccgtgtgcatctggcggaacggcaaggtggggctgtctggcatggccatcgcggacgtcaccctcctgagtggattccacgccctgcgtgctgacctggagaagctgacctccctctctgaccgttacgtgagtcactttgagaccgaggggccccacgtcctgctgtattttgactcggtccccacctcccgggagtgcgtgggctttgaggctgtgcaggaagtgccggtggggctggtgcagccggccagcgcaaccctgtacgactactacaaccccgagcgcagatgttctgtgttttacggggcaccaagtaagagcagactcttggccaccttgtgttctgctgaagtctgccagtgtgctgaggggaagtgccctcgccagcgtcgcgccctggagcggggtctgcaggacgaggatggctacaggatgaagtttgcctgctactacccccgtgtggagtacggcttccaggttaaggttctccgagaagacagcagagctgctttccgcctctttgagaccaagatcacccaagtcctgcacttcaccaaggatgtcaaggccgctgctaatcagatgcgcaacttcctggttcgagcctcctgccgccttcgcttggaacctgggaaagaatatttgatcatgggtctggatggggccacctatgacctcgagggacacccccagtacctgctggactcgaatagctggatcgaggagatgccctctgaacgcctgtgccggagcacccgccagcgggcagcctgtgcccagctcaacgacttcctccaggagtatggcactcaggggtgccaggtgtgagggctgccctcccacctccgctgggaggaacctgaacctgggaaccatgaagctggaagcactgctgtgtccgctttcatgaacacagcctgggaccagggcatattaaaggcttttggcagcaaagtgtcagtgttggc

SEQ ID NO: 60 - DNA, 526 bp, homo sapiens
cagctacagcacagatcagcaccatgaagcttctcacgggcctggttttctgctccttggtcctgagtgtcagcagccgaagcttcttttcgttccttggcgaggcttttgatggggctcgggacatgtggagagcctactctgacatgagagaagccaattacatcggctcagacaaatacttccatgctcgggggaactatgatgctgccaaaaggggacctgggggtgcctgggccgcagaagtgatcagcaatgccagagagaatatccagagactcacaggccatggtgcggaggactcgctggccgatcaggctgccaataaatggggcaggagtggcagagaccccaatcacttccgacctgctggcctgcctgagaaatactgagcttcctcttcactctgctctcaggagacctggctatgagccctcggggcagggattcaaagttagtgaggtctatgtccagagaagctgagatatggcatataataggcatctaataaatgcttaagaggtgg

SEQ ID NO: 61 - DNA, 844 bp, homo sapiens
cagacacagagtaaacttttgctgggctccaagtgaccgcccatagtttattataaaggtgactgcaccctgcagccaccagcactgcctggctccacgtgcctcctggtctcagtatggcgctgtcctgggttcttacagtcctgagcctcctacctctgctggaagcccagatcccattgtgtgccaacctagtaccggtgcccatcaccaacgccaccctggaccggatcactggcaagtggttttatatcgcatcggcctttcgaaacgaggagtacaataagtcggttcaggagatccaagcaaccttcttttactttacccccaacaagacagaggacacgatctttctcagagagtaccagacccgccagaaccagtgcttctataactccagttacctgaatgtccagcgggagaatgggaccgtctccagatacgagggaggccgagaacatgttgctcacctgctgttccttagggacaccaagaccttgatgtttggttcctacctggacgatgagaagaactgggggctgtctttctatgctgacaagccagagacgaccaaggagcaactgggagagttctacgaagctctcgactgcttgtgcattcccaggtcagatgtcatgtacaccgactggaaaaaggataagtgtgagccactggagaagcagcacgagaaggagaggaaacaggaggagggggaatcctagcaggacacagccttggatcaggacagagacttgggggccatcctgcccctccaacccgacatgtgtacctcagctttttccctcacttgcatcaataaagcttctgtgtttggaacagctaa

SEQ ID NO: 62 - DNA, 1463 bp, homo sapiens
atgaacgactttgacgagtgcggccagagcgcagccagcatgtacctgccgggctgcgcctactatgtggccccgtctgacttcgctagcaagccttcgttcctttcccaaccgtcgtcctgccagatgactttcccctactcttccaacctggctccgcacgtccagcccgtgcgcgaagtggccttccgcgactacggcctggagcgcgccaagtggccgtaccgcggcggcggcggcggcggcagcgcggggggcggcagcagcgggggcggccccggcgggggcggcggcggcgcggggggctacgctccctactacgcggcggcggcggcggcggctgcggcggccgcggcggccgaggaggcggccatgcaacgcgagcttctcccgcccgcgggccgccggccggacgtgctcttcaaggcgcctgagccggtgtgcgctgcgccggggccgccgcacggccccgcgggcgccgcctccaacttctacagcgcggtgggccgcaatggcatcttgccacagggcttcgaccagttctacgaggcagcgcccgggcccccgttcgccgggccgcagcccccgccgccacccgcgccgccacagcccgagggcgcagccgacaagggcgaccccaggaccggggctggtggcggcgggggcagtccctgcaccaaggcgacccctggctcggagcccaagggggcagcagaaggcagcggtggcgacggcgagggccccccgggagaggcgggggccgagaagagcagcagcgcagttgccccccagcggtcccggaaaaagcgctgtccctataccaagtaccagatccgcgaactggaacgcgagtttttctttaacgtgtacataaacaaagagaaaagacttcaactctctcggatgctcaacctcactgaccggcaagtcaaaatctggttccagaatcgcaggatgaaagaaaagaaactgaacagagaccgtctgcagtatttcactggaaaccccttattttgagagctccaggaagcgccctcaccccagccccactcacccaccctccttcccaccagcctgctctccgcaggcccactgtccttgggtttaatgacgtctcttctctgtggaacttcacgattccttcccacggtcaactcgggacctcccagcgaccactgcagcctgcggacgaggccgggacttggccgagcggatcctaataaggggaaaatggtaaatgcaaacgtcccgttacaattttaccgccagtgtgctgtcgttccccctccccctctccgagtcctcgtggggacacggcggggtctgtaggaagttgggccgggttgggggttgctagaaggcgctggtgttttgctctgagttttaagagatcccttccttcctcttcggtgaatgcaggttatttaaactttgggaaatgtacttttagtctgtcatatcaa

SEQ ID NO: 63 - DNA, 3734 bp, homo sapiens
ctcctttttctcttttggttaaaagagagcattgtcgttctcagccatgtgctctgtataattaagagctgacactgaagcagagtaacaacatcttctaatttttttacccctgatcacaggtgcaaacatctcaagccagttcagatgttgctgtttcctcaagttgcagttaaaacagagccaatgagcagcagtgaaacagcttcaacgacagccgacgggtctttaaacaatttctcaggttcagcaattgggagcagtagtttcagcccacgaccaactcaccagttctctccaccacagatttacccttccaacagaccatacccacatattctccctaccccttcctcacaaactatggctgcatatgggcaaacacagtttaccacaggaatgcaacaagctacagcctatgccacgtacccacagccaggacagccgtacggcatttcctcatatggtgcattgtgggcaggcatcaagactgaaggtggattgtcacagtctcagtcacctggacagacaggatttctcagctatggcacaagcttcagtacccctcaacctggacaggcaccatacagctaccagatgcaaggtagcagttttacaacatcatcaggaatatatacaggaaataattcactcacaaattcctctggatttaatagttcacagcaggactatccgtcttatcccagttttggccagggtcagtacgcacagtattataacagctcaccgtatccagcacattatatgaccagcagcaacaccagcccaacgacaccatccaccaatgccacttaccagcttcaagaaccgccatctggcatcaccagccaagcagttacagatcccacagcagagtacagcacaatccacagcccatcaacacccattaaagattcagattctgatcgattgcgtcgaggttcagatgggaaatcacgtggacggggccgaagaaacaataatccttcacctcccccagattctgatcttgagagagtgttcatctgggacttggatgagacaatcattgttttccactccttgcttactgggtcctacgccaacagatatgggagggatccacccacttcagtttcccttggactgcgaatggaagaaatgattttcaacttggcagacacacatttattttttaatgacttagaagaatgtgaccaagtccatatagatgatgtttcttcagatgataacggacaggacctaagcacatataactttggaacagatggctttcctgctgcagcaaccagtgctaacttatgtttggcaactggtgtacggggcggtgtggactggatgagaaagttggccttccgctacagacgggtaaaagagatctacaacacctacaaaaataatgttggaggtctgcttggtccagctaagagggaagcctggctgcagttgagggccgaaattgaagccctgaccgactcctggttgacactggccctgaaagcactctcgctcattcactcccggacaaactgtgtgaatattttagtaacaactactcagctcatcccagcattggcgaaagtcctgctgtatgggttaggaattgtatttccaatagaaaatatttacagtgcaactaaaataggaaaagaaagctgttttgagagaataattcaaaggtttggaagaaaagtggtgtatgttgttataggagatggtgtagaagaagaacaaggagcaaaaaagcacgcgatgcccttctggaggatctccagccactcggacctcatggccctgcaccatgccttggaactggagtacctgtaacagcgctcggcactttgacagcgcacagctgctctgtgaccagggacagatccagcaggccccagtctcgcatcagcgccggcctccagaacttagcaatttccgcctggtgatgcgcagttgctgtcagtcttgacctctgcctttgtggtgaatggaggaccacgtctatttcatcagaacagctgttgactctagtactgtgaatccagtgaaaataagccatgagaatgttttagcacagcgttatgtgtctgccacattaactacacggttcaaacctgtgaagaaaggacctgcaaacgcttcagttgttagcattttcaatgtgatataaacagcttctccaatacagcaaacctaattgcacaacagagactgaaatgtgtttcctgaataccagtggaggaattttcttgtaaagaaggtttactttttggtgtctcatacccagggtaatctgtacatctctacttatttatgaacagactttttttaaaaagataaaaaaacagctttattgaggtataattcacccaccagacttttttaaacatcaaataattgaagagacaatagcattagaaataagtgattaaaggcctctgcctcacaacatggcaagtacagtactttgaattttagcacattgcatagtagttttaagtatgtctaatttaaacgtataatatgtacatcactgagacaatcatgtacagaaagaatttttggtgtaaatttgtaataatggataattcttttacatattgtttagggaaatgatattgaaaggtagcaatgcctggatagtgaagcatgaggcagcacgtgcacaaattcatgtgccgtgccttatctgagttttcggtataaatatgtagataatggattttttttttttagataatgttgtcaagaccaaaagcatggatgtcaagtgtcagtaaggattttgttttctaaaattttttcctgcatcagttcttctgagggccttgatgaaataacacagcagtttcttaaacaatttgaaacaaaatgagctctcctaccacctcactttttcatttccacactaatgtattatatgtaactacttggaaaaaataattattcaaatgcttcttcccacaaagaatatagatgatagtagatatattttattaataaaatggttcatgaatcggagactaacaaagttttcatgtgctcagaattattaattatcgtgtctgcattttctttcgataaaggaagacacacgatgctaatccggaaatcagcaaactttgcattactccctatgtgcgtattttctctttcttcctgtcaccctgaggaaggttcattgccattgtcatcaccatggaaacaacgttcctctccacctgcattatgtactacatgacaggcatcaatctggggaaataataaaattatcacctttgtcagaccataagagtttctccaaaagtggtcagtttggctgggcaatattttctctcatctaacaaacacaatccattgtcatgaaattacccttaggatgagtcttctttaatcaatcatatattgggcggaaaaaacaccagctttgacccgaagtagttgaagagctacttcattcttttctgaagttgtgtgttgctgctagaaatagtcatttgtgaattatccaaattgtttaaattcacaattgaattagttttttcttcctttttgcttgaagcaaacagttgacaatttttaaccttttcattttatgtttttgtactctgcagactgaaaagacaaagtttatcttggccttactgtataaaggtgtgctgtgtccaccgttgtgtacagaatttttcttcattaattttgtgtttaagttaataaaatttatttgtgatgtactgtaa

SEQ ID NO: 64 - DNA, 742 bp, homo sapiens
gagctgctcagttaggacccagagggaaccatggaaaccccagcgcagcttctcttcctcctgctactctggctcccagataccaccggagaacttgtgttgacgcagtttccaggcaccctgtctttgtctccagggaaagagccaccctctcctgcagggccagtcagaatgttagaagcaactacttagcctggtaccagcaaaaacatggccaggctcccaggctcctcatctttggtgcatccagcagggccactggcatcccagacaggttcagtggcagtgggtctgggacggacttcactctcaccatcagcagactggagcctgaagattttgcagtgtattactgtcagcagtatggcggctcacccctttttggccagggaccaagttggagatcaaacgaactgtggctgcaccatctgtcttcatcttcccgccatctgatgagcagttgaaatctggaactgcctctgttgtgttgcctgctgaataacttctatcccagagaggccaaagtacagtggaacggtggataacgccctccaatcgggtaactccccaggagagtggtcaccagagcaggacagcaaggacaagaccttacagcctcagcagcacccctgaacgctgagcaaaggcagacttacgagaaaccaccaaagtcttacagcctgcgaagtcaccccatcagggcctgagctcgccccgttacaaagagttcacaggggacagt

SEQ ID NO: 65 - DNA, 1196 bp, homo sapiens
ctgaagtatttttagttatataagattggaactaccaagcatgtggctcctggtcagtgtaattctaatctcacggatatcctctgttgggggagaagcaacattttgtgattttccaaaaataaaccatggaattctatatgatgaagaaaaatataagccattttcccaggttcctacaggggaagttttctaatactcctgtgaatataattttgtgtctccttcaaaatcattttggactcgcataaactgcacagaagaaggatggtcaccaacaccaaagtgtctcagactgtgtttctttccttttgtggaaaatggtcattctgaatcttcaggacaaacacatctggaaggtgatactgtgcaaattatttgcaacacaggatacagacttcaaaacaatgagaacaacatttcatgtgtagaacggggctggtccacccctcccaaatgcaggtccactgacacttcctgtgtgaatccgcccacagtacaaaatgctcatatactgtcgagacagatgagtaaatatccatctggtgagagagtacgttatgaatgtaggagcccttatgaaatgtttggggatgaagaagtgatgtgtttaaatggaaactggacagaaccacctcaatgcaaagattctacgggaaaatgtgggccccctccacctattgacaatggggacattacttcattcccgttgtcagtatatgctccagcttcatcagttgagtaccaatgccagaacttgtatcaacttgagggtaacaagcgaataacatgtagaaatggacaatggtcagaaccaccaaaatgcttacatccgtgtgtaatatcccgagaaattatggaaaattataacatagcattaaggtggacagccaaacagaagctttatttgagaacaggtgaatcagctgaatttgtgtgtaaacggggatatcgtctttcatcacgttctcacacattgcgaacaacatgttgggatgggaaactggagtatccaacttgtgcaaaaagatagaatcaatcataaaatgcacacctttattcagaactttagtattaaatcagttcttaatttcatttttaagtattgttttactcctttttattcatacgtaaaattttggattaatttgtgaaaatgtaattataagctgagaccggtggctctcttcttaaaa

SEQ ID NO: 66 - DNA, 5067 bp, homo sapiens
ctcctccccatcctctccctctgtccctctgtccctctgaccctgcactgtcccagcaccatgggacccacctcaggtcccagcctgctgctcctgctactaacccacctccccctggctctggggagtcccatgtactctatcatcacccccaacatcttgcggctggagagcgaggagaccatggtgctggaggcccacgacgcgcaaggggatgttccagtcactgttactgtccacgacttcccaggcaaaaaactagtgctgtccagtgagaagactgtgctgacccctgccaccaaccacatgggcaacgtcaccttcacgatcccagccaacagggagttcaagtcagaaaaggggcgcaacaagttcgtgaccgtgcaggccaccttcgggacccaagtggtggagaaggtggtgctggtcagcctgcagagcgggtacctcttcatccagacagacaagaccatctacacccctggctccacagttctctatcggatcttcaccgtcaaccacaagctgctacccgtgggccggacggtcatggtcaacattgagaacccggaaggcatcccggtcaagcaggactccttgtcttctcagaaccagcttggcgtcttgcccttgtcttgggacattccggaactcgtcaacatgggccagtggaagatccgagcctactatgaaaactcaccacagcaggtcttctccactgagtttgaggtgaaggagtacgtgctgcccagtttcgaggtcatagtggagcctacagagaaattctactacatctataacgagaagggcctggaggtcaccatcaccgccaggttcctctacgggaagaaagtggagggaactgcctttgtcatcttcgggatccaggatggcgaacagaggatttccctgcctgaatccctcaagcgcattccgattgaggatggctcgggggaggttgtgctgagccggaaggtactgctggacggggtgcagaacctccgagcagaagacctggtggggaagtctttgtacgtgtctgccaccgtcatcttgcactcaggcagtgacatggtgcaggcagagcgcagcgggatccccatcgtgacctctccctaccagatccacttcaccaagacacccaagtacttcaaaccaggaatgccctttgacctcatggtgttcgtgacgaaccctgatggctctccagcctaccgagtccccgtggcagtccagggcgaggacactgtgcagtctctaacccagggagatggcgtggccaaactcagcatcaacacacaccccagccagaagcccttgagcatcacggtgcgcacgaagaagcaggagctctcggaggcagagcaggctaccaggaccatgcaggctctgccctacagcaccgtgggcaactccaacaattacctgcatctctcagtgctacgtacagagctcagacccggggagaccctcaacgtcaacttcctcctgcgaatggaccgcgcccacgaggccaagatccgctactacacctacctgatcatgaacaagggcaggctgttgaaggcgggacgccaggtgcgagagcccggccaggacctggtggtgctgcccctgtccatcaccaccgacttcatcccttccttccgcctggtggcgtactacacgctgatcggtgccagcggccagagggaggtggtggccgactccgtgtgggtggacgtcaaggactcctgcgtgggctcgctggtggtaaaaagcggccagtcagaagaccggcagcctgtacctgggcagcagatgaccctgaagatagagggtgaccacggggcccgggtggtactggtggccgtggacaagggcgtgttcgtgctgaataagaagaacaaactgacgcagagtaagatctgggacgtggtggagaaggcagacatcggctgcaccccgggcagtgggaaggattacgccggtgtcttctccgacgcagggctgaccttcacgagcagcagtggccagcagaccgcccagagggcagaacttcagtgcccgcagccagccgcccgccgacgccgttccgtgcagctcacggagaagcgaatggacaaagtcggcaagtaccccaaggagctgcgcaagtgctgcgaggacggcatgcgggagaaccccatgaggttctcgtgccagcgccggacccgtttcatctccctgggcgaggcgtgcaagaaggtcttcctggactgctgcaactacatcacagagctgcggcggcagcacgcgcgggccagccacctgggcctggccaggagtaacctggatgaggacatcattgcagaagagaacatcgtttcccgaagtgagttcccagagagctggctgtggaacgttgaggacttgaaagagccaccgaaaaatggaatctctacgaagctcatgaatatatttttgaaagactccatcaccacgtgggagattctggctgtcagcatgtcggacaagaaagggatctgtgtggcagaccccttcgaggtcacagtaatgcaggacttcttcatcgacctgcggctaccctactctgttgttcgaaacgagcaggtggaaatccgagccgttctctacaattaccggcagaaccaagagctcaaggtgagggtggaactactccacaatccagccttctgcagcctggccaccaccaagaggcgtcaccagcagaccgtaaccatcccccccaagtcctcgttgtccgttccatatgtcatcgtgccgctaaagaccggcctgcaggaagtggaagtcaaggctgccgtctaccatcatttcatcagtgacggtgtcaggaagtccctgaaggtcgtgccggaaggaatcagaatgaacaaaactgtggctgttcgcaccctggatccagaacgcctgggccgtgaaggagtgcagaaagaggacatcccacctgcagacctcagtgaccaagtcccggacaccgagtctgagaccagaattctcctgcaagggaccccagtggcccagatgacagaggatgccgtcgacgcggaacggctgaagcacctcattgtgaccccctcgggctgcggggaacagaacatgatcggcatgacgcccacggtcatcgctgtgcattacctggatgaaacggagcagtgggagaagttcggcctagagaagcggcagggggccttggagctcatcaagaaggggtacacccagcagctggccttcagacaacccagctctgcctttgcggccttcgtgaaacgggcacccagcacctggctgaccgcctacgtggtcaaggtcttctctctggctgtcaacctcatcgccatcgactcccaagtcctctgcggggctgttaaatggctgatcctggagaagcagaagcccgacggggtcttccaggaggatgcgcccgtgatacaccaagaaatgattggtggattacggaacaacaacgagaaagacatggccctcacggcctttgttctcatctcgctgcaggaggctaaagatatttgcgaggagcaggtcaacagcctgccaggcagcatcactaaagcaggagacttccttgaagccaactacatgaacctacagagatcctacactgtggccattgctggctatgctctggcccagatgggcaggctgaaggggcctcttcttaacaaatttctgaccacagccaaagataagaaccgctgggaggaccctggtaagcagctctacaacgtggaggccacatcctatgccctcttggccctactgcagctaaaagactttgactttgtgcctcccgtcgtgcgttggctcaatgaacagagatactacggtggtggctatggctctacccaggccaccttcatggtgttccaagccttggctcaataccaaaaggacgcccctgaccaccaggaactgaaccttgatgtgtccctccaactgcccagccgcagctccaagatcacccaccgtatccactgggaatctgccagcctcctgcgatcagaagagaccaaggaaaatgagggtttcacagtcacagctgaaggaaaaggccaaggcaccttgtcggtggtgacaatgtaccatgctaaggccaaagatcaactcacctgtaataaattcgacctcaaggtcaccataaaaccagcaccggaaacagaaaagaggcctcaggatgccaagaacactatgatccttgagatctgtaccaggtaccggggagaccaggatgccactatgtctatattggacatatccatgatgactggctttgctccagacacagatgacctgaagcagctggccaatggtgttgacagatacatctccaagtatgagctggacaaagccttctccgataggaacaccctcatcatctacctggacaaggtctcacactctgaggatgactgtctagctttcaaagttcaccaatactttaatgtagagcttatccagcctggagcagtcaaggtctacgcctattacaacctggaggaaagctgtacccggttctaccatccggaaaaggaggatggaaagctgaacaagctctgccgtgatgaactgtgccgctgtgctgaggagaattgcttcatacaaaagtcggatgacaaggtcaccctggaagaacggctggacaaggcctgtgagccaggagtggactatgtgtacaagacccgactggtcaaggttcagctgtccaatgactttgacgagtacatcatggccattgagcagaccatcaagtcaggctcggatgaggtgcaggttggacagcagcgcacgttcatcagccccatcaagtgcagagaagccctgaagctggaggagaagaaacactacctcatgtggggtctctcctccgatttctggggagagaagcccaacctcagctacatcatcgggaaggacacttgggtggagcactggcctgaggaggacgaatgccaagacgaagagaaccagaaacaatgccaggacctcggcgccttcaccgagagcatggttgtctttgggtgccccaactgaccacacccccattcc

SEQ ID NO: 67 - DNA, 967 bp, homo sapiens
ggcagaggcatcatggagggtccccggggatggctggtgctctgtgtgctggccatatcgctggcctctatggtgaccgaggacttgtgccgagcaccagacgggaagaaaggggaggcaggaagacctggcagacgggggcggccaggcctcaagggggagcaaggggagccgggggcccctggcatccggacaggcatccaaggccttaaaggagaccagggggaacctgggccctctggaaaccccggcaaggtgggctacccagggcccagcggccccctcggggcccgtggcatcccgggaattaaaggcaccaagggcagcccaggaaacatcaaggaccagccgaggccagccttctccgccattcggcggaaccccccaatggggggcaacgtggtcatcttcgacacggtcatcaccaaccaggaagaaccgtaccagaaccactccggccgattcgtctgcactgtacccggctactactacttcaccttccaggtgctgtcccagtgggaaatctgcctgtccatcgtctcctcctcaaggggccaggtccgacgctccctgggcttctgtgacaccaccaacaaggggctcttccaggtggtgtcagggggcatggtgcttcagctgcagcagggtgaccaggtctgggttgaaaaagaccccaaaaagggtcacatttaccagggctctgaggccgacagcgtcttcagcggcttcctcatcttcccatctgcctgagccagggaaggaccccctcccccacccacctctctggcttccatgctccgcctgtaaaatgggggcgctattgcttcagctgctgaagggagggggctggctctgagagccccaggactggctgccccgtgacacatgctctaagaagctcgtttcttagacctcttcctggaataaacatctgtgtctgtgtctgctgaaaaaaaaaaaaaaaaaa

SEQ ID NO: 68 - DNA, 2128 bp, homo sapiens
cttgagaatgtttctgcatgatttctctgggcttgctgtcttacctgagagcaggaagtcaaaaggagagtgatggagccacctgctgccctctactttgcagatattaaagaggagcctgaaactgttccttggacatcttatgaatgtcagaaaataccttttggagggttagaagatcaggggacatggttgttcacatttgctgccacggaacaccgccagtcttcacttggaaacagaatcacgccttgtgaagagatcatccctaagcaggagagaagctactaaaggattgtgtcctcctccaccttccctgtgctcggtctccacctgtctcccattctgtgacgatggttcaatggaagagactctgccagctgcattacttgtgggctctgggctgctatatgctgctggccactgtggctctgaaactttctttcaggttgaagtgtgactctgaccacttgggtctggagtccagggaatctcaaagccagtactgtaggaatatcttgtataatttcctgaaacttccagcaaagaggtctatcaactgttcaggggtcacccgaggggaccaagaggcagtgcttcaggctattctgaataacctggaggtcaagaagaagcgagagcctttcacagacacccactacctctccctcaccagagactgtgagcacttcaaggctgaaaggaagttcatacagttcccactgagcaaagaagaggtggagttccctattgcatactctatggtgattcatgagaagattgaaaactttgaaaggctactgcgagctgtgtatgcccctcagaacatatactgtgtccatgtggatgagaagtccccagaaactttcaaagaggcggtcaaagcaattatttcttgcttcccaaatgtcttcatagccagtaagctggttcgggtggtttatgcctcctggtccagggtgcaagctgacctcaactgcatggaagacttgctccagagctcagtgccgtggaaatacttcctgaatacatgtgggacggactttcctataaagagcaatgcagagatggtccaggctctcaagatgttgaatgggaggaatagcatggagtcagaggtacctcctaagcacaaagaaacccgctggaaatatcactttgaggtagtgagagacacattacacctaaccaacaagaagaaggatcctcccccttataatttaactatgtttacagggaatgcgtacattgtggcttcccgagatttcgtccaacatgttttgaagaaccctaaatcccaacaactgattgaatgggtaaaagacacttatagcccagatgaacacctctgggccacccttcagcgtgcacggtggatgcctggctctgttcccaaccaccccaagtacgacatctcagacatgacttctattgccaggctggtcaagtggcagggtcatgagggagacatcgataagggtgctccttatgctccctgctctggaatccaccagcgggctatctgcgtttatggggctggggacttgaattggatgcttcaaaaccatcacctgttggccaacaagtttgacccaaaggtagatgataatgctcttcagtgcttagaagaatacctacgttataaggccatctatgggactgaactttgagacacactatgagagcgttgctacctgtggggcaagagcatgtacaaacatgctcagaacttgctgggacagtgtgggtgggagaccagggctttgcaattcgtggcatcctttaggataagagggctgctattagattgtgggtaagtagatcttttgccttgcaaattgctgcctgggtgaatgctgcttgttctctcacccctaaccctagtagttcctccactaactttctcactaagtgagaatgagaactgctgtgatagggagagtgaaggagggatatgtggtagagcacttgatttcagttgaatgcctgctggtagcttttccattctgtggagctgccgttcctaataattccaggtttggtaacgtggaggagaactttgatggaaagagaacttccttctgtactgttaacttaaaaataaatactcctgatcaaaaaaaaaaaa

SEQ ID NO: 69 - DNA, 1559 bp, homo sapiens
tgctgacactacaaggctcggagctccgggcactcagacatcatgagttggtccttgcacccccggaatttaattctctacttctatgctcttttatttctctcttcaacatgtgtagcatatgttgctaccagagacaactgctgcatcttagatgaaagattcggtagttattgtccaactacctgtggcattgcagatttcctgtctacttatcaaaccaaagtagacaaggatctacagtctttggaagacatcttacatcaagttgaaaacaaaacatcagaagtcaaacagctgataaaagcaatccaactcacttataatcctgatgaatcatcaaaaccaaatatgatagacgctgctactttgaagtccaggataatgttagaagaaattatgaaatatgaagcatcgattttaacacatgactcaagtattcgatatttgcaggaaatatataattcaaataatcaaaagattgttaacctgaaagagaaggtagcccagcttgaagcacagtgccaggaaccttgcaaagacacggtgcaaatccatgatatcactgggaaagattgtcaagacattgccaataagggagctaaacagagcgggctttactttattaaacctctgaaagctaaccagcaattcttagtctactgtgaaatcgatgggtctggaaatggatggactgtgtttcagaagagacttgatggcagtgtagatttcaagaaaaactggattcaatataaagaaggatttggacatctgtctcctactggcacaacagaattttggctgggaaatgagaagattcatttgataagcacacagtctgccatcccatatgcattaagagtggaactggaagactggaatggcagaaccagtactgcagactatgccatgttcaaggtgggacctgaagctgacaagtaccgcctaacatatgcctacttcgctggtggggatgctggagatgcctttgatggctttgattttggcgatgatcctagtgacaagtttttcacatcccataatggcatgcagttcagtacctgggacaatgacaatgataagtttgaaggcaactgtgctgaacaggatggatctggttggtggatgaacaagtgtcacgctggccatctcaatggagtttattaccaaggtggcacttactcaaaagcatctactcctaatggttatgataatggcattatttgggccacttggaaaacccggtggtattccatgaagaaaaccactatgaagataatcccattcaacagactcacaattggagaaggacagcaacaccacctggggggagccaaacaggctggagacgtttaaaagaccgtttcaaaagagatttacttttttaaaggactttatctgaacagagagatataatatttttcctattggacaatggacttgcaaagcttcacttcattttaagagcaaaagaccccatgttgaaaactccataacagttttatgctgatgataatttatctacatgcatttcaataaaccttttgtttcctaagact

SEQ ID NO: 70 - DNA, 4459 bp, homo sapiens
ctctcagtgtctccaactttgcgctggaagaaaaacttcccgcgcgccggcagaactgcagcgcctccttttagtgactccgggagcttcggctgtagccggctctgcgcgcccttccaacgaataatagaaattgttaattttaacaatccagagcaggccaacgaggctttgctctcccgacccgaactaaagctccctcgctccgtgcgctgctacgagcggtgtctcctggggctccaatgcagcgagctgtgcccgaggggttcggaaggcgcaagctgggcagcgacatggggaacgcggagcgggctccggggtctcggagctttgggcccgtacccacgctgctgctgctcgccgcggcgctactggccgtgtcggacgcactcgggcgcccctccgaggaggacgaggagctagtggtgccggagctggagcgcgccccgggacacgggaccacgcgcctccgcctgcacgcctttgaccagcagctggatctggagctgcggcccgacagcagctttttggcgcccggcttcacgctccagaacgtggggcgcaaatccgggtccgagacgccgcttccggaaaccgacctggcgcactgcttctactccggcaccgtgaatggcgatcccagctcggctgccgccctcagcctctgcgagggcgtgcgcggcgccttctacctgctgggggaggcgtatttcatccagccgctgcccgccgccagcgagcgcctcgccaccgccgccccaggggagaagccgccggcaccactacagttccacctcctgcggcggaatcggcagggcgacgtcggcggcacgtgcggggtcgtggacgacgagccccggccgactgggaaagcggagaccgaagacgaggacgaagggactgagggcgaggacgaaggggctcagtggtcgccgcaggacccggcactgcaaggcgtaggacagcccacaggaactggaagcataagaaagaagcgatttgtgtccagtcaccgctatgtggaaaccatgcttgtggcagaccagtcgatggcagaattccacggcagtggtctaaagcattaccttctcacgttgttttcggtggcagccagattgtacaaacaccccagcattcgtaattcagttagcctggtggtggtgaagatcttggtcatccacgatgaacagaaggggccggaagtgacctccaatgctgccctcactctgcggaacttttgcaactggcagaagcagcacaacccacccagtgaccgggatgcagagcactatgacacagcaattcttttcaccagacaggacttgtgtgggtcccagacatgtgatactcttgggatggctgatgttggaactgtgtgtgatccgagcagaagctgctccgtcatagaagatgatggtttacaagctgccttcaccacagcccatgaattaggccacgtgtttaacatgccacatgatgatgcaaagcagtgtgccagccttaatggtgtgaaccaggattcccacatgatggcgtcaatgctttccaacctggaccacagccagccttggtctccttgcagtgcctacatgattacatcatttctggataatggtcatggggaatgtttgatggacaagcctcagaatcccatacagctcccaggcgatctccctggcacctcgtacgatgccaaccggcagtgccagtttacatttggggaggactccaaacactgccccgatgcagccagcacatgtagcaccttgtggtgtaccggcacctctggtggggtgctggtgtgtcaaaccaaacacttcccgtgggcggatggcaccagctgtggagaagggaaatggtgtatcaacggcaagtgtgtgaacaaaaccgacagaaagcattttgatacgccttttcatggaagctggggaatgtgggggccttggggagactgttcgagaacgtgcggtggaggagtccagtacacgatgagggaatgtgacaacccagtcccaaagaatggagggaagtactgtgaaggcaaacgagtgcgctacagatcctgtaaccttgaggactgtccagacaataatggaaaaacctttagagaggaacaatgtgaagcacacaacgagttttcaaaagcttcctttgggagtgggcctgcggtggaatggattcccaagtacgctggcgtctcaccaaaggacaggtgcaagctcatctgccaagccaaaggcattggctacttcttcgttttgcagcccaaggttgtagatggtactccatgtagcccagattccacctctgtctgtgtgcaaggacagtgtgtaaaagctggttgtgatcgcatcatagactccaaaaagaagtttgataaatgtggtgtttgcgggggaaatggatctacttgtaaaaaaatatcaggatcagttactagtgcaaaacctggatatcatgatatcatcacaattccaactggagccaccaacatcgaagtgaaacagcggaaccagaggggatccaggaacaatggcagctttcttgccatcaaagctgctgatggcacatatattcttaatggtgactacactttgtccaccttagagcaagacattatgtacaaaggtgttgtcttgaggtacagcggctcctctgcggcattggaaagaattcgcagctttagccctctcaaagagcccttgaccatccaggttcttactgtgggcaatgcccttcgacctaaaattaaatacacctacttcgtaaagaagaagaaggaatctttcaatgctatccccactttttcagcatgggtcattgaagagtggggcgaatgttctaagtcatgtgaattgggttggcagagaagactggtagaatgccgagacattaatggacagcctgcttccgagtgtgcaaaggaagtgaagccagccagcaccagaccttgtgcagaccatccctgcccccagtggcagctgggggagtggtcatcatgttctaagacctgtgggaagggttacaaaaaaagaagcttgaagtgtctgtcccatgatggaggggtgttatctcatgagagctgtgatcctttaaagaaacctaaacatttcatagacttttgcacaatggcagaatgcagttaagtggtttaagtggtgttagctttgagggcaaggcaaagtgaggaagggctggtgcagggaaagcaagaaggctggagggatccagcgtatcttgccagtaaccagtgaggtgtatcagtaaggtgggattatgggggtagatagaaaaggagttgaatcatcagagtaaactgccagttgcaaatttgataggatagttagtgaggattattaacctctgagcagtgatatagcataataaagccccgggcattattattattatttcttttgttacatctattacaagtttagaaaaaacaaagcaattgtcaaaaaaagttagaactattacaacccctgtttcctggtacttatcaaataacttagtatcatgggggttgggaaatgaaaagtaggagaaaagtgagattttactaagacctgttttactttaccttcactaacaatggggggagaaaggagtacaaataggatctttgaccagcactgtttatggctgctatggtttcagagaatgtttatacattatttctaccgagaattaaaacttcagattgttcaacatgagagaaaggctcagcaacgtgaaataacgcaaatggcttcctctttccttttttggaccatctcagtctttatttgtgtaattcattttgaggaaaaaacaactccatgtatttattcaagtgcattaaagtctacaatggaaaaaaagcagtgaagcattagatgctggtaaaagctagaggagacacaatgagcttagtacctccaacttcctttctttcctaccatgtaaccctgctttgggaatatggatgtaaagaagtaacttgtgtctcatgaaaatcagtacaatcacacaaggaggatgaaacgccggaacaaaaatgaggtgtgtagaacagggtcccacaggtttggggacattgagatcacttgtcttgtggtggggaggctgctgaggggtagcaggtccatctccagcagctggtccaacagtcgtatcctggtgaatgtctgttcagctcttctgtgagaatatgattttttccatatgtatatagtaaaatatgttactataaattacatgtactttataagtattggtttgggtgttccttccaagaaggactatagttagtaataaatgcctataataacatatttatttttatacatttatttctaatgaaaaaaacttttaaattatatcgcttttgtggaagtgcatataaaatagagtatttatacaatatatgttactagaaataaaagaacacttttggaaaaaaaaaaaaaaaaaaaaa

SEQ ID NO: 71 - DNA, 1631 bp, homo sapiens
ggacttctagcccctgaactttcagccgaatacatcttttccaaaggagtgaattcaggcccttgtatcactggcagcaggacgtgaccatggagaagctgttgtgtttcttggtcttgaccagcctctctcatgcttttggccagacagacatgtcgaggaaggcttttgtgtttcccaaagagtcggatacttcctatgtatccctcaaagcaccgttaacgaagcctctcaaagccttcactgtgtgcctccacttctacacggaactgtcctcgacccggggtacagtattttctcgtatgccaccaagagacaagacaatgagattcttcatattttggtctaaggatataggatacagttttacagtgggtgggtctgaaatattattcgaggttcctgaagtcacagtagctccagtacacatttgtacaagctgggagtccgcctcagggatcgtggagttctgggtagatgggaagcccagggtgaggaagagtctgaagaagggatacactgtgggggcagaagcaagcatcatcttggggcaggagcaggattccttcggtgggaactttgaaggaagccagtccctggtgggagacattggaaatgtgaacatgtgggactttgtgctgtcaccagatgagattaacaccatctatcttggcgggcccttcagtcctaatgtcctgaactggcgggcactgaagtatgaagtgcaaggcgaagtgttcaccaaaccccagctgtggccctgaggcccagctgtgggtcctgaaggtacctcccggttttttacaccgcatgggccccacgtctctgtctctggtacctcccgcttttttacactgcatggttcccacgtctctgtctctgggcctttgttcccctatatgcattgcaggcctgctccaccctcctcagcgcctgagaatggaggtaaagtgtctggtctgggagctcgttaactatgctgggaaacggtccaaaagaatcagaatttgaggtgttttgttttcatttttatttcaagttggacagatcttggagataatttcttacctcacatagatgagaaaactaacacccagaaaggagaaatgatgttataaaaaactcataaggcaagagctgagaaggaagcgctgatcttctatttaattccccacccatgacccccagaaagcaggagcattgcccacattcacagggctcttcagtatcagaatcaggacactggccaggtgtctggtttgggtccagagtgctcatcatcatgtcatagaactgctgggcccaggtctcctgaaatgggaagcccagcaataccacgcagtccctccactttctcaaagcacactggaaaggccattagaattgccccagcagagcagatctgctttttttccagagcaaaatgaagcactaggtataaatatgttgttactgccaagaacttaaatgactggtttttgtttgcttgcagtgctttcttaattttatggctcttctgggaaactcctccccttttccacacgaaccttgtggggctgtgaattctttcttcatccccgcattcccaatatacccaggccacaagagtggacgtgaacacaggtgccgtg

SEQ ID NO: 72 - DNA, 1389 bp, homo sapiens
atggctagggtactgggagcacccgttgcactggggttgtggagcctatgctggtctctggccattgccacccctcttcctccgactagtgcccatgggaatgttgctgaaggcgagaccaagccagacccagacgtgactgaacgctgctcagatggctggagctttgatgctaccaccctggatgacaatggaaccatgctgttttttaaaggggagtttgtgtggaagagtcacaaatgggaccgggagttaatctcagagagatggaagaatttccccagccctgtggatgctgcattccgtcaaggtcacaacagtgtctttctgatcaagggggacaaagtctgggtataccctcctgaaaagaaggagaaaggatacccaaagttgctccaagatgaatttcctggaatcccatccccactggatgcagctgtggaatgtcaccgtggagaatgtcaagctgaaggcgtcctcttcttccaaggtgaccgcgagtggttctgggacttggctacgggaaccatgaaggagcgttcctggccagctgttgggaactgctcctctgccctgagatggctgggccgctactactgcttccagggtaaccaattcctgcgcttcgaccctgtcaggggagaggtgcctcccaggtacccgcgggatgtccgagactacttcatgccctgccctggcagaggccatggacacaggaatgggactggccatgggaacagtacccaccatggccctgagtatatgcgctgtagcccacatctagtcttgtctgcactgacgtctgacaaccatggtgccacctatgccttcagtgggacccactactggcgtctggacaccagccgggatggctggcatagctggcccattgctcatcagtggccccagggtccttcagcagtggatgctgccttttcctgggaagaaaaactctatctggtccagggcacccaggtatatgtcttcctgacaaagggaggctataccctagtaagcggttatccgaagcggctggagaaggaagtcgggacccctcatgggattatcctggactctgtggatgcggcctttatctgccctgggtcttctcggctccatatcatggcaggacggcggctgtggtggctggacctgaagtcaggagcccaagccacgtggacagagcttccttggccccatgagaaggtagacggagccttgtgtatggaaaagtcccttggccctaactcatgttccgccaatggtcccggcttgtacctcatccatggtcccaatttgtactgctacagtgatgtggagaaactgaatgcagccaaggcccttccgcaaccccagaatgtgaccagtctcctgggctgcactcactga

SEQ ID NO: 73 - DNA, 2767 bp, homo sapiens
gcggagggtgcgtgcgggccgcggcagccgaacaaaggagcaggggcgccgccgcagggacccgccacccacctcccggggccgcgcagcggcctctcgtctactgccaccatgaccgccaacggcacagccgaggcggtgcagatccagttcggcctcatcaactgcggcaacaagtacctgacggccgaggcgttcgggttcaaggtgaacgcgtccgccagcagcctgaagaagaagcagatctggacgctggagcagccccctgacgaggcgggcagcgcggccgtgtgcctgcgcagccacctgggccgctacctggcggcggacaaggacggcaacgtgacctgcgagcgcgaggtgcccggtcccgactgccgtttcctcatcgtggcgcacgacgacggtcgctggtcgctgcagtccgaggcgcaccggcgctacttcggcggcaccgaggaccgcctgtcctgcttcgcgcagacggtgtcccccgccgagaagtggagcgtgcacatcgccatgcaccctcaggtcaacatctacagtgtcacccgtaagcgctacgcgcacctgagcgcgcggccggccgacgagatcgccgtggaccgcgacgtgccctggggcgtcgactcgctcatcaccctcgccttccaggaccagcgctacagcgtgcagaccgccgaccaccgcttcctgcgccacgacgggcgcctggtggcgcgccccgagccggccactggctacacgctggagttccgctccggcaaggtggccttccgcgactgcgagggccgttacctggcgccgtcggggcccagcggcacgctcaaggcgggcaaggccaccaaggtgggcaaggacgagctctttgctctggagcagagctgcgcccaggtcgtgctgcaggcggccaacgagaggaacgtgtccacgcgccagggtatggacctgtctgccaatcaggacgaggagaccgaccaggagaccttccagctggagatcgaccgcgacaccaaaaagtgtgccttccgtacccacacgggcaagtactggacgctgacggccaccgggggcgtgcagtccaccgcctccagcaagaatgccagctgctactttgacatcgagtggcgtgaccggcgcatcacactgagggcgtccaatggcaagtttgtgacctccaagaagaatgggcagctggccgcctcggtggagacagcaggggactcagagctcttcctcatgaagctcatcaaccgccccatcatcgtgttccgcggggagcatggcttcatcggctgccgcaaggtcacgggcaccctggacgccaaccgctccagctatgacgtcttccagctggagttcaacgatggcgcctacaacatcaaagactccacaggcaaatactggacggtgggcagtgactccgcggtcaccagcagcggcgacactcctgtggacttcttcttcgagttctgcgactataacaaggtggccatcaaggtgggcgggcgctacctgaagggcgaccacgcaggcgtcctgaaggcctcggcggaaaccgtggaccccgcctcgctctgggagtactagggccggcccgtccttccccgcccctgcccacatggcggctcctgccaaccctccctgctaaccccttctccgccaggtgggctccagggcgggaggcaagcccccttgcctttcaaactggaaaccccagagaaaacggtgcccccacctgtcgcccctatggactccccactctcccctccgcccgggttccctactcccctcgggtcagcggctgcggcctggccctgggagggatttcagatgcccctgccctcttgtctgccacggggcgagtctggcacctctttcttctgacctcagacggctctgagccttatttctctggaagcggctaagggacggttgggggctgggagccctgggcgtgtagtgtaactggaatcttttgcctctcccagccacctcctcccagccccccaggagagctgggcacatgtcccaagcctgtcagtggccctccctggtgcactgtccccgaaacccctgcttgggaagggaagctgtcgggagggctaggactgacccttgtggtgtttttttgggtggtggctggaaacagcccctctcccacgtgggagaggctcagcctggctcccttccctggagcggcagggcgtgacggccacagggtctgcccgctgcacgttctgccaaggtggtggtggcgggcgggtaggggtgtgggggccgtcttcctcctgtctctttcctttcaccctagcctgactggaagcagaaaatgaccaaatcagtattttttttaatgaaatattattgctggaggcgtcccaggcaagcctggctgtagtagcgagtgatctggcggggggcgtctcagcaccctccccagggggtgcatctcagccccctctttccgtccttcccgtccagccccagccctgggcctgggctgccgacacctgggccagagcccctgctgtgattggtgctccctgggcctcccgggtggatgaagccaggcgtcgccccctccgggagccctggggtgagccgccggggcccccctgctgccagcctcccccgtccccaacatgcatctcactctgggtgtcttggtcttttattttttgtaagtgtcatttgtataactctaaacgcccatgatagtagcttcaaactggaaatagcgaaataaaataactcagtctgc

SEQ ID NO: 74 - DNA, 7560 bp, homo sapiens
accggccacagcctgcctactgtcacccgcctctcccgcgcgcagatacacgcccccgcctccgtgggcacaaaggcagcgctgctggggaactcgggggaacgcgcacgtgggaaccgccgcagctccacactccaggtacttcttccaaggacctaggtctctcgcccatcggaaagaaaataattctttcaagaagatcagggacaactgatttgaagtctactctgtgcttctaaatccccaattctgctgaaagtgaatccctagagccctagagccccagcagcacccagccaaacccacctccaccatgggggccatgactcagctgttggcaggtgtctttcttgctttccttgccctcgctaccgaaggtggggtcctcaagaaagtcatccggcacaagcgacagagtggggtgaacgccaccctgccagaagagaaccagccagtggtgtttaaccacgtttacaacatcaagctgccagtgggatcccagtgttcggtggatctggagtcagccagtggggagaaagacctggcaccgccttcagagcccagcgaaagctttcaggagcacacagtagatggggaaaaccagattgtcttcacacatcgcatcaacatcccccgccgggcctgtggctgtgccgcagcccctgatgttaaggagctgctgagcagactggaggagctggagaacctggtgtcttccctgagggagcaatgtactgcaggagcaggctgctgtctccagcctgccacaggccgcttggacaccaggcccttctgtagcggtcggggcaacttcagcactgaaggatgtggctgtgtctgcgaacctggctggaaaggccccaactgctctgagcccgaatgtccaggcaactgtcaccttcgaggccggtgcattgatgggcagtgcatctgtgacgacggcttcacgggcgaggactgcagccagctggcttgccccagcgactgcaatgaccagggcaagtgcgtgaatggagtctgcatctgtttcgaaggctacgccggggctgactgcagccgtgaaatctgcccagtgccctgcagtgaggagcacggcacatgtgtagatggcttgtgtgtgtgccacgatggctttgcaggcgatgactgcaacaagcctctgtgtctcaacaattgctacaaccgtggacgatgcgtggagaatgagtgcgtgtgtgatgagggtttcacgggcgaagactgcagtgagctcatctgccccaatgactgcttcgaccggggccgctgcatcaatggcacctgctactgcgaagaaggcttcacaggtgaagactgcgggaaacccacctgcccacatgcctgccacacccagggccggtgtgaggaggggcagtgtgtatgtgatgagggctttgccggtttggactgcagcgagaagaggtgtcctgctgactgtcacaatcgtggccgctgtgtagacgggcggtgtgagtgtgatgatggtttcactggagctgactgtggggagctcaagtgtcccaatggctgcagtggccatggccgctgtgtcaatgggcagtgtgtgtgtgatgagggctatactggggaggactgcagccagctacggtgccccaatgactgtcacagtcggggccgctgtgtcgagggcaaatgtgtatgtgagcaaggcttcaagggctatgactgcagtgacatgagctgccctaatgactgtcaccagcacggccgctgtgtgaatggcatgtgtgtttgtgatgacggctacacaggggaagactgccgggatcgccaatgccccagggactgcagcaacaggggcctctgtgtggacggacagtgcgtctgtgaggacggcttcaccggccctgactgtgcagaactctcctgtccaaatgactgccatggccagggtcgctgtgtgaatgggcagtgcgtgtgccatgaaggatttatgggcaaagactgcaaggagcaaagatgtcccagtgactgtcatggccagggccgctgcgtggacggccagtgcatctgccacgagggcttcacaggcctggactgtggccagcactcctgccccagtgactgcaacaacttaggacaatgcgtctcgggccgctgcatctgcaacgagggctacagcggagaagactgctcagaggtgtctcctcccaaagacctcgttgtgacagaagtgacggaagagacggtcaacctggcctgggacaatgagatgcgggtcacagagtaccttgtcgtgtacacgcccacccacgagggtggtctggaaatgcagttccgtgtgcctggggaccagacgtccaccatcatccaggagctggagcctggtgtggagtactttatccgtgtatttgccatcctggagaacaagaagagcattcctgtcagcgccagggtggccacgtacttacctgcacctgaaggcctgaaattcaagtccatcaaggagacatctgtggaagtggagtgggatcctctagacattgcttttgaaacctgggagatcatcttccggaatatgaataaagaagatgagggagagatcaccaaaagcctgaggaggccagagacctcttaccggcaaactggtctagctcctgggcaagagtatgagatatctctgcacatagtgaaaaacaatacccggggccctggcctgaagagggtgaccaccacacgcttggatgcccccagccagatcgaggtgaaagatgtcacagacaccactgccttgatcacctggttcaagcccctggctgagatcgatggcattgagctgacctacggcatcaaagacgtgccaggagaccgtaccaccatcgatctcacagaggacgagaaccagtactccatcgggaacctgaagcctgacactgagtacgaggtgtccctcatctcccgcagaggtgacatgtcaagcaacccagccaaagagaccttcacaacaggcctcgatgctcccaggaatcttcgacgtgtttcccagacagataacagcatcaccctggaatggaggaatggcaaggcagctattgacagttacagaattaagtatgcccccatctctggaggggaccacgctgaggttgatgttccaaagagccaacaagccacaaccaaaaccacactcacaggtctgaggccgggaactgaatatgggattggagtttctgctgtgaaggaagacaaggagagcaatccagcgaccatcaacgcagccacagagttggacacgcccaaggaccttcaggtttctgaaactgcagagaccagcctgaccctgctctggaagacaccgttggccaaatttgaccgctaccgcctcaattacagtctccccacaggccagtgggtgggagtgcagcttccaagaaacaccacttcctatgtcctgagaggcctggaaccaggacaggagtacaatgtcctcctgacagccgagaaaggcagacacaagagcaagcccgcacgtgtgaaggcatccactgaacaagcccctgagctggaaaacctcaccgtgactgaggttggctgggatggcctcagactcaactggaccgcggctgaccaggcctatgagcactttatcattcaggtgcaggaggccaacaaggtggaggcagctcggaacctcaccgtgcctggcagccttcgggctgtggacataccgggcctcaaggctgctacgccttatacagtctccatctatggggtgatccagggctatagaacaccagtgctctctgctgaggcctccacaggggaaactcccaatttgggagaggtcgtggtggccgaggtgggctgggatgccctcaaactcaactggactgctccagaaggggcctatgagtactttttcattcaggtgcaggaggctgacacagtagaggcagcccagaacctcaccgtcccaggaggactgaggtccacagacctgcctgggctcaaagcagccactcattataccatcaccatccgcggggtcactcaggacttcagcacaacccctctctctgttgaagtcttgacagaggaggttccagatatgggaaacctcacagtgaccgaggttagctgggatgctctcagactgaactggaccacgccagatggaacctatgaccagtttactattcaggtccaggaggctgaccaggtggaagaggctcacaatctcacggttcctggcagcctgcgttccatggaaatcccaggcctcagggctggcactccttacacagtcaccctgcacggcgaggtcaggggccacagcactcgaccccttgctgtagaggtcgtcacagaggatctcccacagctgggagatttagccgtgtctgaggttggctgggatggcctcagactcaactggaccgcagctgacaatgcctatgagcactttgtcattcaggtgcaggaggtcaacaaagtggaggcagcccagaacctcacgttgcctggcagcctcagggctgtggacatcccgggcctcgaggctgccacgccttatagagtctccatctatggggtgatccggggctatagaacaccagtactctctgctgaggcctccacagccaaagaacctgaaattggaaacttaaatgtttctgacataactcccgagagcttcaatctctcctggatggctaccgatgggatcttcgagacctttaccattgaaattattgattccaataggttgctggagactgtggaatataatatctctggtgctgaacgaactgcccatatctcagggctaccccctagtactgattttattgtctacctctctggacttgctcccagcatccggaccaaaaccatcagtgccacagccacgacagaggccctgccccttctggaaaacctaaccatttccgacattaatccctacgggttcacagtttcctggatggcatcggagaatgcctttgacagctttctagtaacggtggtggattctgggaagctgctggacccccaggaattcacactttcaggaacccagaggaagctggagcttagaggcctcataactggcattggctatgaggttatggtctctggcttcacccaagggcatcaaaccaagcccttgagggctgagattgttacagaagccgaaccggaagttgacaaccttctggtttcagatgccaccccagacggtttccgtctgtcctggacagctgatgaaggggtcttcgacaattttgttctcaaaatcagagataccaaaaagcagtctgagccactggaaataaccctacttgcccccgaacgtaccagggacttaacaggtctcagagaggctactgaatacgaaattgaactctatggaataagcaaaggaaggcgatcccagacagtcagtgctatagcaacaacagccatgggctccccaaaggaagtcattttctcagacatcactgaaaattcggctactgtcagctggagggcacccacggcccaagtggagagcttccggattacctatgtgcccattacaggaggtacaccctccatggtaactgtggacggaaccaagactcagaccaggctggtgaaactcatacctggcgtggagtaccttgtcagcatcatcgccatgaagggctttgaggaaagtgaacctgtctcagggtcattcaccacagctctggatggcccatctggcctggtgacagccaacatcactgactcagaagccttggccaggtggcagccagccattgccactgtggacagttatgtcatctcctacacaggcgagaaagtgccagaaattacacgcacggtgtccgggaacacagtggagtatgctctgaccgacctcgagcctgccacggaatacacactgagaatctttgcagagaaagggccccagaagagctcaaccatcactgccaagttcacaacagacctcgattctccaagagacttgactgctactgaggttcagtcggaaactgccctccttacctggcgacccccccgggcatcagtcaccggttacctgctggtctatgaatcagtggatggcacagtcaaggaagtcattgtgggtccagataccacctcctacagcctggcagacctgagcccatccacccactacacagccaagatccaggcactcaatgggcccctgaggagcaatatgatccagaccatcttcaccacaattggactcctgtaccccttccccaaggactgctcccaagcaatgctgaatggagacacgacctctggcctctacaccatttatctgaatggtgataaggctcaggcgctggaagtcttctgtgacatgacctctgatgggggtggatggattgtgttcctgagacgcaaaaacggacgcgagaacttctaccaaaactggaaggcatatgctgctggatttggggaccgcagagaagaattctggcttgggctggacaacctgaacaaaatcacagcccaggggcagtacgagctccgggtggacctgcgggaccatggggagacagcctttgctgtctatgacaagttcagcgtgggagatgccaagactcgctacaagctgaaggtggaggggtacagtgggacagcaggtgactccatggcctaccacaatggcagatccttctccacctttgacaaggacacagattcagccatcaccaactgtgctctgtcctacaaaggggctttctggtacaggaactgtcaccgtgtcaacctgatggggagatatggggacaataaccacagtcagggcgttaactggttccactggaagggccacgaacactcaatccagtttgctgagatgaagctgagaccaagcaacttcagaaatcttgaaggcaggcgcaaacgggcataaattggagggaccactgggtgagagaggaataaggcggcccagagcgaggaaaggattttaccaaagcatcaatacaaccagcccaaccatcggtccacacctgggcatttggtgagaatcaaagctgaccatggatccctggggccaacggcaacagcatgggcctcacctcctctgtgatttctttctttgcaccaaagacatcagtctccaacatgtttctgttttgttgtttgattcagcaaaaatctcccagtgacaacatcgcaatagttttttacttctcttaggtggctctgggatgggagaggggtaggatgtacaggggtagtttgttttagaaccagccgtattttacatgaagctgtataattaattgtcattatttttgttagcaaagattaaatgtgtcattggaagccatccctttttttacatttcatacaacagaaaccagaaaagcaatactgtttccattttaaggatatgattaatattattaatataataatgatgatgatgatgatgaaaactaaggatttttcaagagatctttctttccaaaacatttctggacagtacctgattgtattttttttttaaataaaagcacaagtacttttgaaaaaaaaccggaattc

SEQ ID NO: 75 - DNA, 4491 bp, homo sapiens
aaatgtagagaagcagccgataaaatagcattgcctgaagaagtttggaggctgagagcagcagtagactggccaactgcagagcaagttgtttctccagccgtgcggtgcagcctcatgcccccaacccagcttagccactgtaagaagacgttcactgtacagacgaccaaacttgccgtggaagagacagttgtgagattcccttgcaaatttacatacgagaatggcttgtgaaatcatgcctctgcaaagttcacaggaagatgaaagacctctgtcacctttctatttgagtgctcatgtaccccaagtcagcaatgtgtctgcaaccggagaactcttagaaagaaccatccgatcagctgtagaacaacatctttttgatgttaataactctggaggtcaaagttcagaggactcagaatctggaacactatcagcatcttctgccacatctgccagacagcgccgccgccagtccaaggagcaggatgaagttcgacatgggagagacaagggacttatcaacaaagaaaatactccttctgggttcaaccaccttgatgattgtattttgaatactcaggaagtcgaaaaggtacacaaaaatacttttggttgtgctggagaaaggagcaagcctaaacgtcagaaatccagtactaaactttctgagcttcatgacaatcaggacggtcttgtgaatatggaaagtctcaattccacacgatctcatgagagaactggacctgatgattttgaatggatgtctgatgaaaggaaaggaaatgaaaaagatggtggacacactcagcattttgagagccccacaatgaagatccaggagcatcccagcctatctgacaccaaacagcagagaaatcaagatgccggtgaccaggaggagagctttgtctccgaagtgccccagtcggacctgactgcattgtgtgatgaaaagaactgggaagagcctatccctgctttctcctcctggcagcgggagaacagtgactctgatgaagcccacctctcgccgcaggctgggcgcctgatccgtcagctgctggacgaagacagcgaccccatgctctctcctcggttctacgcttatgggcagagcaggcaatacctggatgacacagaagtgcctccttccccaccaaactcccattctttcatgaggcggcgaagctcctctctggggtcctatgatgatgagcaagaggacctgacacctgcccagctcacacgaaggattcagagccttaaaaagaagatccggaagtttgaagatagattcgaagaagagaagaagtacagaccttcccacagtgacaaagcagccaatccggaggttctgaaatggacaaatgaccttgccaaattccggagacaacttaaagaatcaaaactaaagatatctgaagaggacctaactcccaggatgcggcagcgaagcaacacactccccaagagttttggttcccaacttgagaaagaagatgagaagaagcaagagctggtggataaagcaataaagcccagtgttgaagccacattggaatctattcagaggaagctccaggagaagcgagcggaaagcagccgccctgaggacattaaggatatgaccaaagaccagattgctaatgagaaagtggctctgcagaaagctctgttatattatgaaagcattcatggacggccggtaacaaagaacgaacggcaggtgatgaagccactatacgacaggtaccggctggtcaaacagatcctctcccgagctaacaccatacccatcattggttccccctccagcaagcggagaagccctttgctgcagccaattatcgagggcgaaactgcttccttcttcaaggagataaaggaagaagaggaggggtcagaagacgatagcaatgtgaagccagacttcatggtcactctgaaaaccgatttcagtgcacgatgctttctggaccaattcgaagatgacgctgatggatttatttccccaatggatgataaaataccatcaaaatgcagccaggacacagggctttcaaatctccatgctgcctcaatacctgaactcctggaacacctccaggaaatgagagaagaaaagaaaaggattcgaaagaaacttcgggattttgaagacaactttttcagacagaatggaagaaatgtccagaaggaagaccgcactcctatggctgaagaatacagtgaatataagcacataaaggcgaaactgaggctcctggaggtgctcatcagcaagagagacactgattccaagtccatgtgaggggcatggccaagcacagggggctggcagctgcggtgagagtttactgtccccagagaaagtgcagctctggaaggcagccttggggctggccctgcaaagcatgcagcccttctgcctctagaccatttggcatcggctcctgtttccattgcctgccttagaaactggctggaagaagacaatgtgacctgacttaggcattttgtaattggaaagtcaagactgcagtatgtgcacatgcgcacgcgcatgcacgcacacacacacacagtagtggagctttcctaacactagcagagattaatcactacattagacaacactcatctacagagaatatacactgttcttccctggataactgagaaacaagagaccattctctgtctaactgtgataaaaacaagctcaggactttattctatagagcaaacttgctgtggagggccatgctctccttggacccagttaactgcaaacgtgcattggagccctatttgctgccgctgccattctagtgacctttccacagagctgcgccttcctcacgtgtgtgaaaggttttccccttcagccctcaggtagatggaagctgcatctgcccacgatggcagtgcagtcatcatcttcaggatgtttcttcaggacttcctcagctgacaaggaattttggtccctgcctaggaccgggtcatctgcagaggacagagagatggtaagcagctgtatgaatgctgattttaaaaccaggtcatgggagaagagcctggagattctttcctgaacactgactgcacttaccagtctgattttatcgtcaaacaccaagccaggctagcatgctcatggcaatctgtttggggctgttttgttgtggcactagccaaacataaaggggcttaagtcagcctgcatacagaggatcggggagagaaggggcctgtgttctcagcctcctgagtacttaccagagtttaatttttttaaaaaaaatctgcactaaaatccccaaactgacaggtaaatgtagccctcagagctcagcccaaggcagaatctaaatcacactattttcgagatcatgtataaaaagaaaaaaaagaagtcatgctgtgtggccaattataatttttttcaaagactttgtcacaaaactgtctatattagacattttggagggaccaggaaatgtaagacaccaaatcctccatctcttcagtgtgcctgatgtcacctcatgatttgctgttacttttttaactcctgcgccaaggacagtgggttctgtgtccacctttgtgctttgcgaggccgagcccaggcatctgctcgcctgccacggctgaccagagaaggtgcttcaggagctctgccttagacgacgtgttacagtatgaacacacagcagaggcaccctcgtatgttttgaaagttgccttctgaaagggcacagttttaaggaaaagaaaaagaatgtaaaactatactgacccgttttcagttttaaagggtcgtgagaaactggctggtccaatgggatttacagcaacattttccattgctgaagtgaggtagcagctctcttctgtcagctgaatgttaaggatggggaaaaagaatgcctttaagtttgctcttaatcgtatggaagcttgagctatgtgttggaagtgccctggttaatccatacacaaagacggtacataatcctacaggtttaaatgtacataaaaatatagtttggaattctttgctctactgtttacattgcagattgctataatttcaaggagtgagattataaataaaatgatgcactttaggatgtttcctatttttgaaatctgaacatgaatcattcacatgaccaaaaattgtgtttttttaaaaatacatgtctagtctgtcctttaatagctctcttaaataagctatgatattaatcagatcattaccagttagcttttaaagcacatttgtttaagactatgtttttggaaaaatacgctacagaatttttttttaagctacaaataaatgagatgctactaattgttttggaatctgttgtttctgccaaaggtaaattaactaaagatttattcaggaatccccatttgaatttgtatgattcaataaaagaaaacaccaagtaagttatataaaat

SEQ ID NO: 76 - DNA, 3442 bp, homo sapiens
agccggtgcgccgcagactagggcgcctcgggccagggagcgcggaggagccatggccaccgctaacggggccgtggaaaacgggcagccggacgggaagccgccggccctgccgcgccccatccgcaacctggaggtcaagttcaccaagatatttatcaacaatgaatggcacgaatccaagagtgggaaaaagtttgctacatgtaacccttcaactcgggagcaaatatgtgaagtggaagaaggagataagcccgacgtggacaaggctgtggaggctgcacaggttgccttccagaggggctcgccatggcgccggctggatgccctgagtcgtgggcggctgctgcaccagctggctgacctggtggagagggaccgcgccaccttggccgccctggagacgatggatacagggaagccatttcttcatgcttttttcatcgacctggagggctgtattagaaccctcagatactttgcagggtgggcagacaaaatccagggcaagaccatccccacagatgacaacgtcgtatgcttcaccaggcatgagcccattggtgtctgtggggccatcactccatggaacttccccctgctgatgctggtgtggaagctggcacccgccctctgctgtgggaacaccatggtcctgaagcctgcggagcagacacctctcaccgccctttatctcggctctctgatcaaagaggccgggttccctccaggagtggtgaacattgtgccaggattcgggcccacagtgggagcagcaatttcttctcaccctcagatcaacaagatcgccttcaccggctccacagaggttggaaaactggttaaagaagctgcgtcccggagcaatctgaagcgggtgacgctggagctgggggggaagaacccctgcatcgtgtgtgcggacgctgacttggacttggcagtggagtgtgcccatcagggagtgttcttcaaccaaggccagtgttgcacggcagcctccagggtgttcgtggaggagcaggtctactctgagtttgtcaggcggagcgtggagtatgccaagaaacggcccgtgggagaccccttcgatgtcaaaacagaacaggggcctcagattgatcaaaagcagttcgacaaaatcttagagctgatcgagagtgggaagaaggaaggggccaagctggaatgcgggggctcagccatggaagacaaggggctcttcatcaaacccactgtcttctcagaagtcacagacaacatgcggattgccaaagaggagattttcgggccagtgcaaccaatactgaagttcaaaagtatcgaagaagtgataaaaagagcgaatagcaccgactatggactcacagcagccgtgttcacaaaaaatctcgacaaagccctgaagttggcttctgccttagagtctggaacggtctggatcaactgctacaacgccctctatgcacaggctccatttggtggctttaaaatgtcaggaaatggcagagaactaggtgaatacgctttggccgaatacacagaagtgaaaactgtcaccatcaaacttggcgacaagaacccctgaaggaaaggcggggctccttcctcaaacatcggacggcggaatgtggcagatgaaatgtgctggaggaaaaaaatgacatttctgaccttcccgggacacattcttctggaggctttacatctactggagttgaatgattgctgttttcctctcactctcctgtttattcaccagactggggatgcctataggttgtctgtgaaatcgcagtcctgcctggggagggagctgttggccatttctgtgtttccctttaaaccagatcctggagacagtgagatactcagggcgttgttaacagggagtggtatttgaagtgtccagcagttgcttgaaatgctttgccgaatctgactccagtaagaatgtgggaaaaccccctgtgtgttctgcaagcagggctcttgcaccagcggtctcctcagggtggacctgcttacagagcaagccacgcctctttccgaggtgaaggtgggaccattccttgggaaaggattcacagtaaggttttttggtttttgttttttgttttcttgtttttaaaaaaaggatttcacagtgagaaagttttggttagtgcataccgtggaagggcgccagggtctttgtggattgcatgttgacattgaccgtgagattcggcttcaaaccaatactgcctttggaatatgacagaatcaatagcccagagagcttagtcaaagacgatatcacggtctaccttaaccaaggcactttcttaagcagaaaatattgttgaggttacctttgctgctaaagatccaatcttctaacgccacaacagcatagcaaatcctaggataattcacctcctcatttgacaaatcagagctgtaattcactttaacaaattacgcatttctatcacgttcactaacagcttatgataagtctgtgtagtcttccttttctccagttctgttacccaatttagattagtaaagcgtacacaactggaaagactgctgtaataacacagccttgttatttttaagtcctattttgatattaatttctgattagttagtaaataacacctggattctatggaggacctcggtcttcatccaagtggcctgagtatttcactggcaggttgtgaatttttcttttcctctttgggaatccaaatgatgatgtgcaatttcatgttttaacttgggaaactgaaagtgttcccatatagcttcaaaaacaaaaacaaatgtgttatccgacggatacttttatggttactaactagtactttcctaattgggaaagtagtgcttaagtttgcaaattaagttggggagggcaataataaaatgagggcccgtaacagaaccagtgtgtgtataacgaaaaccatgtataaaatgggcctatcacccttgtcagagatataaattaccacatttggcttcccttcatcagctaacacttatcacttatactaccaataacttgttaaatcaggatttggcttcatacactgaattttcagtattttatctcaagtagatatagacactaaccttgatagtgatacgttagagggttcctattcttccattgtacgataatgtctttaatatgaaatgctacattatttataattggtagagttattgtatctttttatagttgtaagtacacagaggtggtatatttaaacttctgtaatatactgtatttagaaatggaaatatatatagtgttaggtttcacttcttttaaggtttacccctgtggtgtggtttaaaaatctataggcctgggaattccgatcctagctgcagatcgcatcccacaatgcgagaatgataaaataaaattggatatttgaga

SEQ ID NO: 77 - DNA, 997 bp, homo sapiens
gaaggaaaaagagcaacagatccagggagcattcacctgccctgtctccaaacagccttgtgcctcacctacccccaacctcccagagggagcagctatttaaggggagcaggagtgcagaacaaacaagacggcctggggatacaactctggagtcctctgagagagccaccaaggaggagcaggggagcgacggccggggcagaagttgagaccacccagcagaggagctaggccagtccatctgcatttgtcacccaagaactcttaccatgaagaccctcctactgttggcagtgatcatgatctttggcctactgcaggcccatgggaatttggtgaatttccacagaatgatcaagttgacgacaggaaaggaagccgcactcagttatggcttctacggctgccactgtggcgtgggtggcagaggatcccccaaggatgcaacggatcgctgctgtgtcactcatgactgttgctacaaacgtctggagaaacgtggatgtggcaccaaatttctgagctacaagtttagcaactcggggagcagaatcacctgtgcaaaacaggactcctgcagaagtcaactgtgtgagtgtgataaggctgctgccacctgttttgctagaaacaagacgacctacaataaaaagtaccagtactattccaataaacactgcagagggagcacccctcgttgctgagtcccctcttccctggaaaccttccacccagtgctgaatttccctctctcataccctccctccctaccctaaccaagttccttggccatgcagaaagcatccctcacccatcctagaggccaggcaggagcccttctatacccacccagaatgagacatccagcagatttccagccttctactgctctcctccacctcaactccgtgcttaaccaaagaagctgtactccggggggtctcttctgaataaagcaattagcaaaaaaaaaaaaaaaaaaaaaaaaaaaaaa

SEQ ID NO: 78 - DNA, 3186 bp, homo sapiens
gcggccgcggcggtgcagcagaggcgcctcgggcaggaggagggcggcttctgcgagggcagcctgaggtattaaaaagtgtcagcaaactgcattgaataacagacatcctaagaggggatattttccacctctataatgaagaaaagcaggagtgtgatgacggtgatggctgatgataatgttaaagattattttgaatgtagcttgagtaaatcctacagttcttccagtaacacacttgggatcgacctctggagagggagaaggtgttgctcaggaaacttacagttaccaccactgtctcaaagacagagtgaaagggcaaggactcctgagggagatggtatttccaggccgaccacactgcctttgacaacgcttccaagcattgctattacaactgtaagccaggagtgctttgatgtggaaaatggcccttccccaggtcggagtccactggatccccaggccagctcttccgctgggctggtacttcacgccacctttcctgggcacagccagcgcagagagtcatttctctacagatcagacagcgactatgacttgtcaccaaaggcgatgtcgagaaactcttctcttccaagcgagcaacacggcgatgacttgattgtaactccttttgcccaggtccttgccagcttgcgaagtgtgagaaacaacttcactatactgacaaaccttcatggtacatctaacaagaggtccccagctgctagtcagcctcctgtctccagagtcaacccacaagaagaatcttatcaaaaattagcaatggaaacgctggaggaattagactggtgtttagaccagctagagaccatacagacctaccggtctgtcagtgagatggcttctaacaagttcaaaagaatgctgaaccgggagctgacacacctctcagagatgagccgatcagggaaccaggtgtctgaatacatttcaaatactttcttagacaagcagaatgatgtggagatcccatctcctacccagaaagacagggagaaaaagaaaaagcagcagctcatgacccagataagtggagtgaagaaattaatgcatagttcaagcctaaacaatacaagcatctcacgctttggagtcaacactgaaaatgaagatcacctggccaaggagctggaagacctgaacaaatggggtcttaacatctttaatgtggctggatattctcacaatagacccctaacatgcatcatgtatgctatattccaggaaagagacctcctaaagacattcagaatctcatctgacacatttataacctacatgatgactttagaagaccattaccattctgacgtggcatatcacaacagcctgcacgctgctgatgtagcccagtcgacccatgttctcctttctacaccagcattagacgctgtcttcacagatttggagatcctggctgccatttttgcagctgccatccatgacgttgatcatcctggagtctccaatcagtttctcatcaacacaaattcagaacttgctttgatgtataatgatgaatctgtgttggaaaatcatcaccttgctgtgggtttcaaactgctgcaagaagaacactgtgacatcttcatgaatctcaccaagaagcagcgtcagacactcaggaagatggttattgacatggtgttagcaactgatatgtctaaacatatgagcctgctggcagacctgaagacaatggtagaaacgaagaaagttacaagttcaggcgttcttctcctagacaactataccgatcgcattcaggtccttcgcaacatggtacactgtgcagacctgagcaaccccaccaagtccttggaattgtatcggcaatggacagaccgcatcatggaggaatttttccagcagggagacaaagagcgggagaggggaatggaaattagcccaatgtgtgataaacacacagcttctgtggaaaaatcccaggttggtttcatcgactacattgtccatccattgtgggagacatgggcagatttggtacagcctgatgctcaggacattctcgataccttagaagataacaggaactggtatcagagcatgatacctcaaagtccctcaccaccactggacgagcagaacagggactgccagggtctgatggagaagtttcagtttgaactgactctcgatgaggaagattctgaaggacctgagaaggagggagagggacacagctatttcagcagcacaaagacgctttgtgtgattgatccagaaaacagagattccctgggagagactgacatagacattgcaacagaagacaagtcccccgtggatacataatccccctctccctgtggagatgaacattctatccttgatgagcatgccagctatgtggtagggccagcccaccatgggggccaagacctgcacaggacaagggccacctggcctttcagttacttgagtttggagtcagaaagcaagaccaggaagcaaatagcagctcaggaaatcccacggttgacttgccttgatggcaagcttggtggagagggctgaagctgttgctgggggccgattctgatcaagacacatggcttgaaaatggaagacacaaaactgagagatcattctgcactaagtttcgggaacttatccccgacagtgactgaactcactgactaataacttcatttatgaatcttctcacttgtccctttgtctgccaacctgtgtgccttttttgtaaaacattttcatgtctttaaaatgcctgttgaatacctggagtttagtatcaacttctacacagataagctttcaaagttgacaaacttttttgactctttctggaaaagggaaagaaaatagtcttccttctttcttgggcaatatccttcactttactacagttacttttgcaaacagacagaaaggatacacttctaaccacattttacttccttcccctgttgtccagtccaactccacagtcactcttaaaacttctctctgtttgcctgcctccaacagtacttttaactttttgctgtaaacagaataaaattgaacaaattagggggtagaaaggagcagtggtgtcgttcaccgtgagagtctgcatagaactcagcagtgtgccctgctgtgtcttggaccctgcaatgcggccgc

SEQ ID NO: 79 - DNA, 1094 bp, homo sapiens
ccgccccggtccgcaaagccggtggcgcccggaggctgcacggagagcggtgcccgcgtcagtgaccgaaggaagagaccaagatgaatgcagagcccgagaggaagtttggcgtggtggtggttggtgttggccgagccggctccgtgcggatgagggacttgcggaatccacacccttcctcagcgttcctgaacctgattggcttcgtgtcgagaagggagctcgggagcattgatggagtccagcagatttctttggaggatgctctttccagccaagaggtggaggtcgcctatatctgcagtgagagctccagccatgaggactacatcaggcagttccttaatgctggcaagcacgtccttgtggaataccccatgacactgtcattggcggccgctcaggaactgtgggagctggctgagcagaaaggaaaagtcttgcacgaggagcatgttgaactcttgatggaggaattcgctttcctgaaaaaagaagtggtggggaaagacctgctgaaagggtcgctcctcttcacagctggcccgttggaagaagagcggtttggcttccctgcattcagcggcatctctcgcctgacctggctggtctccctctttggggagctttctcttgtgtctgccactttggaagagcgaaaggaagatcagtatatgaaaatgacagtgtgtctggagacagagaagaaaagtccactgtcatggattgaagaaaaaggacctggtctaaaacgaaacagatatttaagcttccatttcaagtctgggtccttggagaatgtgccaaatgtaggagtgaataagaacatatttctgaaagatcaaaatatatttgtccagaaactcttgggccagttctctgagaaggaactggctgctgaaaagaaacgcatcctgcactgcctggggcttgcagaagaaatccagaaatattgctgttcaaggaagtaagaggaggaggtgatgtagcacttccaagatggcaccagcatttggttcttctcaagagttgaccattatctctattcttaaaattaaacatgttggggaaacaagaaaaaaaaaaaaaaa

SEQ ID NO: 80 - DNA, 4168 bp, homo sapiens
aagacttaggaagactggtggatgcgtttgggttgtagctaggctttttcttttctttctcttttaaaacacatctagacaaggaaaaaacaagcctcggatctgatttttcactcctcgttcttgtgcttggttcttactgtgtttgtgtattttaaaggcgagaagacgaggggaacaaaaccagctggatccatccatcaccgtgggtggttttaatttttcgttttttctcgttatttttttttaaacaaccactcttcacaatgaacaaactgtatatcggaaacctcagcgagaacgccgccccctcggacctagaaagtatcttcaaggacgccaagatcccggtgtcgggacccttcctggtgaagactggctacgcgttcgtggactgcccggacgagagctgggccctcaaggccatcgaggcgctttcaggtaaaatagaactgcacgggaaacccatagaagttgagcactcggtcccaaaaaggcaaaggattcggaaacttcagatacgaaatatcccgcctcatttacagtgggaggtgctggatagtttactagtccagtatggagtggtggagagctgtgagcaagtgaacactgactcggaaactgcagttgtaaatgtaacctattccagtaaggaccaagctagacaagcactagacaaactgaatggatttcagttagagaatttcaccttgaaagtagcctatatccctgatgaaatggccgcccagcaaaaccccttgcagcagccccgaggtcgccgggggcttgggcagaggggctcctcaaggcaggggtctccaggatccgtatccaagcagaaaccatgtgatttgcctctgcgcctgctggttcccacccaatttgttggagccatcataggaaaagaaggtgccaccattcggaacatcaccaaacagacccagtctaaaatcgatgtccaccgtaaagaaaatgcgggggctgctgagaagtcgattactatcctctctactcctgaaggcacctctgcggcttgtaagtctattctggagattatgcataaggaagctcaagatataaaattcacagaagagatccccttgaagattttagctcataataactttgttggacgtcttattggtaaagaaggaagaaatcttaaaaaaattgagcaagacacagacactaaaatcacgatatctccattgcaggaattgacgctgtataatccagaacgcactattacagttaaaggcaatgttgagacatgtgccaaagctgaggaggagatcatgaagaaaatcagggagtcttatgaaaatgatattgcttctatgaatcttcaagcacatttaattcctggattaaatctgaacgccttgggtctgttcccacccacttcagggatgccacctcccacctcagggcccccttcagccatgactcctccctacccgcagtttgagcaatcagaaacggagactgttcatctgtttatcccagctctatcagtcggtgccatcatcggcaagcagggccagcacatcaagcagctttctcgctttgctggagcttcaattaagattgctccagcggaagcaccagatgctaaagtgaggatggtgattatcactggaccaccagaggctcagttcaaggctcagggaagaatttatggaaaaattaaagaagaaaactttgttagtcctaaagaagaggtgaaacttgaagctcatatcagagtgccatcctttgctgctggcagagttattggaaaaggaggcaaaacggtgaatgaacttcagaatttgtcaagtgcagaagttgttgtccctcgtgaccagacacctgatgagaatgaccaagtggttgtcaaaataactggtcacttctatgcttgccaggttgcccagagaaaaattcaggaaattctgactcaggtaaagcagcaccaacaacagaaggctctgcaaagtggaccacctcagtcaagacggaagtaaaggctcaggaaacagcccaccacagaggcagatgccaaaccaaagacagattgcttaaccaacagatgggcgctgaccccctatccagaatcacatgcacaagtttttacctagccagttgtttctgaggaccaggcaacttttgaactcctgtctctgtgagaatgtatactttatgctctctgaaatgtatgacacccagctttaaaacaaacaaacaaacaaacaaaaaaagggtgggggagggagggaaagagaagagctctgcacttccctttgttgtagtctcacagtataacagatattctaattcttcttaatattcccccataatgccagaaattggcttaatgatgctttcactaaattcatcaaatagattgctcctaaatccaattgttaaaattggatcagaataattatcacaggaacttaaatgttaagccattagcatagaaaaactgttctcagttttatttttacctaacactaacatgagtaacctaagggaagtgctgaatggtgttggcaggggtattaaacgtgcatttttactcaactacctcaggtattcagtaatacaatgaaaagcaaaattgttccttttttttgaaaattttatatactttataatgatagaagtccaaccgttttttaaaaaataaatttaaaatttaacagcaatcagctaacaggcaaattaagatttttacttctggctggtgacagtaaagctggaaaattaatttcagggttttttgaggcttttgacacagttattagttaaatcaaatgttcaaaaatacggagcagtgcctagtatctggagagcagcactaccatttattctttcatttatagttgggaaagtttttgacggtactaacaaagtggtcgcaggagattttggaacggctggtttaaatggcttcaggagacttcagttttttgtttagctacatgattgaatgcataataaatgctttgtgcttctgactatcaatacctaaagaaagtgcatcagtgaagagatgcaagactttcaactgactggcaaaaagcaagctttagcttgtcttataggatgcttagtttgccactacacttcagaccaatgggacagtcatagatggtgtgacagtgtttaaacgcaacaaaaggctacatttccatggggccagcactgtcatgagcctcactaagctattttgaagatttttaagcactgataaattaaaaaaaaaaaattagactccaccttaagtagtaaagtataacaggatttctgtatactgtgcaatcagttctttgaaaaaaaagtcaaaagatagagaatacaagaaaagtttttgggatataatttgaatgactgtgaaaacatatgacctttgataacgaactcatttgctcactccttgacagcaaagcccagtacgtacaattgtgttgggtgtgggtggtctccaaggccacgctgctctctgaattgattttttgagttttgtttgtaagatgatcacagtcatgttacactgatctaaaggacatatatataaccctttaaaaaaaaaatcactgcctcattcttatttcaagatgaatttctatacagactagatgtttttctgaagatcaattagacattttgaaaatgatttaaagtgttttccttaatgttctctgaaaacaagtttcttttgtagttttaaccaaaaaagtgccctttttgtcactggattctcctagcattcatgatttttttttcatacaatgaattaaaattgctaaaatcatggactggctttctggttggatttcaggtaagatgtgtttaaggccagagcttttctcagtatttgatttttttccccaatatttgattttttaaaaatatacacataggtgctgcatttatatctgctggtttaaattctgtcatatttcacttctagccttttagtatggcaaatcatattttacttttacttaagcatttgtaatttggagtatctggtactagctaagaaataattctataattgagttttgtactcaccatatatggatcattcctcatgtataatgtgccccaaatgcagcttcattttccagataccttgacgcagaataaattttttcatcatttaggtgcaaaaaaaaaa

SEQ ID NO: 81 - DNA, 5215 bp, homo sapiens
cgagcgcggcgcccttgagctgcaccgcggcgcaggtttgcgagccgacttgtcagccggccaagaaaaggaagctccgtcccttcccgctcacccggcttccccaccccttgtactctaaactctgcagagggcgagcggcgcggccacggaggcgccgaggaggagcgagccgccgccgggcagcggcgtgccctcgggggagagggcgccggagaggaggcggcggcgcggcggcgagggcgcggcgcgcgatggcagctgcttagcccggcgggcgcggagcagccccgagctgtggctggccaggcggtgcggctgggcgggggacgccgccgccgttgctgcccggcccggagagatgagcacggaggcggacgagggcatcactttctctgtgccacccttcgccccctcgggcttctgcaccatccccgagggcggcatctgcaggaggggaggagcggcggcggtgggcgagggcgaggagcaccagctgccaccgccgccgccgggcagcttctggaacgtggagagcgccgctgcccctggcatcggttgtccggcggccacctcctcgagcagtgccacccgaggccggggcagctctgttggcgggggcagccgacggaccacggtggcatatgtgatcaacgaagcgagccaagggcaactggtggtggccgagagcgaggccctgcagagcttgcgggaggcgtgcgagacagtgggcgccaccctggaaaccctgcattttgggaaactcgactttggagaaaccaccgtgctggaccgcttttacaatgcagatattgcggtggtggagatgagcgatgccttccggcagccgtccttgttttaccaccttggggtgagagaaagtttcagcatggccaacaacatcatcctctactgtgatactaactcggactctctgcagtcactgaaggaaataatttgccagaagaatactatgtgcactgggaactacacctttgttccttacatgataactccacataacaaagtctactgctgtgacagcagcttcatgaaggggttgacagagctcatgcaaccgaacttcgagctgcttcttggacccatctgcttacctcttgtggatcgttttattcaacttttgaaggtggcacaagcaagttctagccagtacttccgggaatctatactcaatgacatcaggaaagctcgtaatttatacactggtaaagaattggcagctgagttggcaagaattcggcagcgagtagataatatcgaagtcttgacagcagatattgtcataaatctgttactttcctacagagatatccaggactatgattctattgtgaagctggtagagactttagaaaaactgccaacctttgatttggcctcccatcaccatgtgaagtttcattatgcatttgcactgaataggagaaatctccctggtgacagagcaaaagctcttgatattatgattcccatggtgcaaagcgaaggacaagttgcttcagatatgtattgcctagttggtcgaatctacaaagatatgtttttggactctaatttcacggacactgaaagcagagaccatggagcttcttggttcaaaaaggcatttgaatctgagccaacactacagtcaggaattaattatgcggtcctcctcctggcagctggacaccagtttgaatcttcctttgagctccggaaagttggggtgaagctaagtagtcttcttggtaaaaagggaaacttggaaaaactccagagctactgggaagttggattttttctgggggccagcgtcctagccaatgaccacatgagagtcattcaagcatctgaaaagctttttaaactgaagacaccagcatggtacctcaagtctattgtagagacaattttaatatataagcattttgtgaaactgaccacagaacagcctgtggccaagcaagaacttgtggacttttggatggatttcctggtcgaggccacaaagacagatgttactgtggttaggtttccagtattaatattagaaccaaccaaaatctatcaaccttcttatttgtctatcaacaatgaagttgaggaaaagacaatctctatttggcacgtgcttcctgatgacaagaaaggtatacatgagtggaattttagtgcctcttctgtcaggggagtgagtatttctaaatttgaagaaagatgctgctttctttatgtgcttcacaattctgatgatttccaaatctatttctgtacagaacttcattgtaaaaagttttttgagatggtgaacaccattaccgaagagaaggggagaagcacagaggaaggagactgtgaaagtgacttgctggagtatgactatgaatatgatgaaaatggtgacagagtcgttttaggaaaaggcacttatgggatagtctacgcaggtcgggacttgagcaaccaagtcagaattgctattaaggaaatcccagagagagacagcagatactctcagcccctgcatgaagaaatagcattgcataaacacctgaagcacaaaaatattgtccagtatctgggctctttcagtgagaatggtttcattaaaatcttcatggagcaggtccctggaggaagtctttctgctctccttcgttccaaatggggtccattaaaagacaatgagcaaacaattggcttttatacaaagcaaatactggaaggattaaaatatctccatgacaatcagatagttcaccgggacataaagggtgacaatgtgttgattaatacctacagtggtgttctcaagatctctgacttcggaacatcaaagaggcttgctggcataaacccctgtactgaaacttttactggtaccctccagtatatggcaccagaaataatagataaaggaccaagaggctacggaaaagcagcagacatctggtctctgggctgtacaatcattgaaatggccacaggaaaacccccattttatgaactgggagaaccacaagcagctatgttcaaggtgggaatgtttaaagtccaccctgagatcccagagtccatgtctgcagaggccaaggcattcatactgaaatgttttgaaccagatcctgacaagagagcctgtgctaacgacttgcttgttgatgagtttttaaaagtttcaagcaaaaagaaaaagacacaacctaagctttcagctctttcagctggatcaaatgaatatctcaggagtatatccttgccggtacctgtgctggtggaggacaccagcagcagcagtgagtacggctcagtttcacccgacacggagttgaaagtggaccccttctctttcaaaacaagagccaagtcctgcggagaaagagatgtcaagggaattcggacactctttttgggcattccagatgagaattttgaagatcacagtgctcctccttcccctgaagaaaaagattctggattcttcatgctgaggaaggacagtgagaggcgagctacccttcacaggatcctgacggaagaccaagacaaaattgtgagaaacctaatggaatctttagctcagggggctgaagaaccgaaactaaaatgggaacacatcacaaccctcattgcaagcctcagagaatttgtgagatccactgaccgaaaaatcatagccaccacactgtcaaagctgaaactggagctggacttcgacagccatggcattagccaagtccaggtggtactctttggttttcaagatgctgtcaataaagttcttcggaatcataacatcaagccgcactggatgtttgccttagacagtatcattcggaaggcggtacagacagccattaccatcctggttccagaactaaggccacatttcagccttgcatctgagagtgatactgctgatcaagaagacttggatgtagaagatgaccatgaggaacagccttcaaatcaaactgtccgaagacctcaggctgtcattgaagatgctgtggctacctcaggcgtgagcacgctcagttctactgtgtctcatgattcccagagtgctcaccggtcactgaatgtacagcttggaaggatgaaaatagaaaccaatagattactggaagaattggttcggaaagagaaagaattacaagcactccttcatcgagctattgaagaaaaagaccaagaaattaaacacctgaagcttaagtcccaacccatagaaattcctgaattgcctgtatttcatctaaattcttctggcacaaatactgaagattctgaacttaccgactggctgagagtgaatggagctgatgaagacactataagccggtttttggctgaagattatacactattggatgttctctactatgttacacgtgatgacttaaaatgcttgagactaaggggagggatgctgtgcacactgtggaaggctatcattgactttcgaaacaaacagacttgactgttgctcaatctaatcttcgatggaaattctaaaaattaatacagagctgatcttcttgggggtgggaaaatcgaagggagaggagaaaggcgctgcactttaaatccagtatttgtttactcatgttaaaaaaaaaaaaaacagacaaaacacactgaaatttcctaactacatctatttctataatttttaaggactcttcataaggactcttaaaataatcctgaacattagaaccctaatgttcaggaagattttaatctaagcatttttatggaaatatttttaatgcagcagctattgcacttcagccaaatgtttatttcacacaaaacggatgtaacatttcatgtgatcgtgcaccactggaacaaaaccaaaatgtgaccataactgtttaggcttctgtgtgtttgtaatatgctctaataatctgagtagaaatgcgtaatttcaattactgtataaagtttatgtttttttaagtgtgcagaatctgagagcaatggtttttacttctctgtgttaattgtaatattgactctattttgtaacttaagtttctgacctgtcgtacatttgtttgagtcgtttatgtactactgaactgtaccagttgcacatgcttgaactgtagtaatgttagcttgttctaaagctatccattgtgtcatatttactctaaaaattaaagagactctcaacaaaaaaaaaaaaaaaaaaaaa

SEQ ID NO: 82 - DNA, 15720 bp, homo sapiens
caacccacaccgcccctgccagccaccatggggctgccactagcccgcctggcggctgtgtgcctggccctgtctttggcagggggctcggagctccagacagagggcagaacccgataccacggccgcaacgtctgcagcacctggggcaacttccactacaagaccttcgacggggacgtcttccgcttccccggcctctgcgactacaacttcgcctccgactgccgaggctcctacaaggaatttgctgtgcacctgaagcggggtccgggccaggctgaggcccccgccggggtggagtccatcctgctgaccatcaaggatgacaccatctacctcacccgccacctggctgtgcttaacggggccgtggtcagcaccccgcactacagccccgggctgctcattgagaagagcgatgcctacaccaaagtctactcccgcgccggcctcaccctcatgtggaaccgggaggatgcactcatgctggagctggacactaagttccggaaccacacctgtggcctctgcggggactacaacggcctgcagagctattcagaattcctctctgacggcgtgctcttcagtcccctggagtttgggaacatgcagaagatcaaccagcccgatgtggtgtgtgaggatcccgaggaggaggtggcccccgcatcctgctccgagcaccgcgccgagtgtgagaggctgctgaccgccgaggccttcgcggactgtcaggacctggtgccgctggagccgtatctgcgcgcctgccagcaggaccgctgccggtgcccgggcggtgacacctgcgtctgcagcaccgtggccgagttctcccgccagtgctcccacgccggcggccggcccgggaactggaggaccgccacgctctgccccaagacctgccccgggaacctggtgtacctggagagcggctcgccctgcatggacacctgctcacacctggaggtgagcagcctgtgcgaggagcaccgcatggacggctgtttctgcccagaaggcaccgtatatgacgacatcggggacagtggctgcgttcctgtgagccagtgccactgcaggctgcacggacacctgtacacaccgggccaggagatcaccaatgactgcgagcagtgtgtctgtaacgctggccgctgggtgtgcaaagacctgccctgccccggcacctgtgccctggaaggcggctcccacatcaccaccttcgatgggaagacgtacaccttccacggggactgctactatgtcctggccaagggtgaccacaacgattcctacgctctcctgggcgagctggccccctgtggctccacagacaagcagacctgcctgaagacggtggtgctgctggctgacaagaagaagaatgcggtggtcttcaagtccgatggcagtgtactgctcaaccagctgcaggtgaacctgccccacgtgaccgcgagcttctctgtcttccgcccgtcttcctaccacatcatggtgagcatggccattggcgtccggctgcaggtgcagctggccccagtcatgcaactctttgtgacactggaccaggcctcccaggggcaggtgcagggcctctgcgggaacttcaacggcctggaaggtgacgacttcaagacggccagcgggctggtggaggccacgggggccggctttgccaacacctggaaggcacagtcaacctgccatgacaagctggactggttggacgatccctgctccctgaacatcgagagcgccaactacgccgagcactggtgctccctcctgaagaagacagagaccccctttggcaggtgccactcggctgtggaccctgctgagtattacaagaggtgcaaatatgacacgtgtaactgtcagaacaatgaggactgcctgtgcgccgccctgtcctcctacgcgcgcgcctgcaccgccaagggcgtcatgctgtggggctggcgggagcatgtctgcaacaaggatgtgggctcctgccccaactcgcaggtcttcctgtacaacctgaccacctgccagcagacctgccgctccctctccgaggccgacagccactgtctcgagggctttgcgcctgtggacggctgcggctgccctgaccacaccttcctggacgagaagggccgctgcgtacccctggccaagtgctcctgttaccaccgcggtctctacctggaggcgggggatgtggtcgtcaggcaggaagaacgatgtgtgtgccgggatgggcggctgcactgtaggcagatccggctgatcggccagagctgcacggccccaaagatccacatggactgcagcaacctgactgcactggccacctcgaagccccgagccctcagctgccagacgctggccgccggctattaccacacagagtgtgtcagtggctgtgtgtgccccgacgggctgatggatgacggccggggtggctgcgtggtggagaaggaatgcccttgcgtccataacaacgacctgtattcttccggcgccaagatcaaggtggactgcaatacctgcacctgcaagagaggacgctgggtgtgcacccaggctgtgtgccatggcacctgctccatttacgggagtggccactacatcacctttgatgggaagtactacgactttgacggacactgctcctacgtggctgttcaggactactgcggccagaactcctcactgggctcattcagcatcatcaccgagaacgtcccctgtggcactacgggcgtcacctgctccaaggccatcaagatcttcatggggaggacggagctgaagttggaagacaagcaccgtgtggtgatccagcgtgatgagggtcaccacgtggcctacaccacgcgggaggtgggccagtacctggtggtggagtccagcacgggcatcatcgtcatctgggacaagaggaccaccgtgttcatcaagctggctccctcctacaagggcaccgtgtgtggcctgtgtgggaactttgaccaccgctccaacaacgacttcaccacgcgggaccacatggtggtgagcagcgagctggacttcgggaacagctggaaggaggcccccacctgcccagatgtgagcaccaaccccgagccctgcagcctgaacccgcaccgccgctcctgggccgagaagcagtgcagcatcctcaaaagcagcgtgttcagcatctgccacagcaaggtggaccccaagcccttctacgaggcctgtgtgcacgactcgtgctcctgtgacacgggtggggactgtgagtgcttctgctctgccgtggcctcctacgcccaggagtgtaccaaagagggggcctgcgtgttctggaggacgccggacctgtgccccatattctgcgactactacaaccctccgcatgagtgtgagtggcactatgagccatgtgggaaccggagcttcgagacctgcaggaccatcaacggcatccactccaacatctccgtgtcctacctggagggctgctacccccggtgccccaaggacaggcccatctatgaggaggatctgaagaagtgtgtcactgcagacaagtgtggctgctatgtcgaggacacccactacccacctggagcatcggttcccaccgaggagacctgcaagtcctgcgtgtgtaccaactcctcccaagtcgtctgcaggccggaggaaggaaagattcttaaccagacccaggatggcgccttctgctactgggagatctgtggccccaacgggacggtggagaagcacttcaacatctgttccattacgacacgcccgtccaccctgaccaccttcaccaccatcaccctccccaccacccccacctccttcaccactaccaccaccaccaccaccccgacctccagcacagttttatcaacaactccgaagctgtgctgcctctggtctgactggatcaatgaggaccaccccagcagtggcagcgacgacggtgaccgagaaccatttgatggggtctgcggggcccctgaggacatcgagtgcaggtcggtcaaggatccccacctcagcttggagcagcatggccagaaggtgcagtgtgatgtctctgttgggttcatttgcaagaatgaagaccagtttggaaatggaccatttggactgtgttacgactacaagatacgtgtcaattgttgctggcccatggataagtgtatcaccactcccagccctccaactaccactcccagccctccaccaaccacgacgaccacccttccaccaaccaccacccccagccctccaaccaccaccacaaccacccctccaccaaccaccacccccagccctccaataaccaccacgaccacccctctaccaaccaccactcccagccctccaataagcaccacaaccacccctccaccaaccaccactcccagccctccaaccaccactcccagccctccaaccaccactcccagccctccaacaaccaccacaaccacccctccaccaaccaccactcccagccctccaatgactacgcccatcactccaccagccagcactaccacccttccaccaaccaccactcccagccctccaacaaccaccacaaccacccctccaccaaccaccactcccagtcctccaacgactacgcccatcactccaccaaccagcactactacccttccaccaaccaccactcccagccctccaccaaccaccacaaccacccctccaccaaccaccactcccagccctccaacaaccaccactcccagtcctccaacaatcaccacaaccacccctccaccaaccaccactcccagccctccaacaacgaccacaaccacccctccaccaaccaccactcccagccctccaacgactacacccatcactccaccaaccagcactaccacccttccaccaaccaccactcccagccctccaccaaccaccacaaccacccctccaccaaccaccactcccagccctccaacaaccaccactcccagccctccaataaccaccacaaccacccctccaccaaccaccactcccagctctccaataaccaccactcccagccctccaacaaccaccatgaccaccccttcaccaaccaccacccccagctctccaataaccaccacaaccaccccttcctcaactaccactcccagccctccaccaaccaccatgaccaccccttcaccaaccaccactcccagccctccaacaaccaccatgaccacccttccaccaaccaccacttccagccctctaacaactactcctctacctccatcaataactcctcctacattttcaccattctcaacgacaacccctactaccccatgcgtgcctctctgcaattggactggctggctggattctggaaaacccaactttcacaaaccaggtggagacacagaattgattggagacgtctgtggaccaggctgggcagctaacatctcttgcagagccaccatgtatcctgatgttcccattggacagcttggacaaacagtggtgtgtgatgtctctgtggggctgatatgcaaaaatgaagaccaaaagccaggtggggtcatccctatggccttctgcctcaactacgagatcaacgttcagtgctgtgagtgtgtcacccaacccaccaccatgacaaccaccaccacagagaacccaactccgccaaccacgacacccatcaccaccaccactacggtgaccccaaccccaacacccaccggcacacagaccccaaccacgacacccatcaccaccaccactacggtgaccccaaccccaacacccaccggcacacagaccccaaccacgacacccatcaccaccaccactacggtgaccccaaccccaacacccaccggcacacagaccccaaccacgacacccatcaccaccaccactacggtgaccccaaccccaacacccaccggcacacagaccccaaccacgacacccatcaccaccaccactacggtgaccccaaccccaacacccaccggcacacagaccccaaccacgacacccatcaccaccaccactacggtgaccccaaccccaacacccaccggcacacagaccccaaccacgacacccatcaccaccaccactacggtgaccccaaccccaacacccaccggcacacagaccccaaccacgacacccatcaccaccaccactacggtgaccccaaccccaacacccaccggcacacagaccccaaccacgacacccatcaccaccaccactacggtgaccccaaccccaacacccaccggcacacagaccccaaccacgacacccatcaccaccaccactacggtgaccccaaccccaacacccaccggcacacagaccccaaccacgacacccatcaccaccaccactacggtgaccccaaccccaacacccaccggcacacagaccccaaccacgacacccatcaccaccaccactacggtgaccccaaccccaacacccaccggcacacagaccccaaccacgacacccatcaccaccaccactacggtgaccccaaccccaacacccaccggcacacagaccccaaccacgacacccatcaccaccaccactacggtgaccccaaccccaacacccaccggcacacagaccccaaccacgacacccatcaccaccaccactacggtgaccccaaccccaacacccaccggcacacagaccccaaccacgacacccatcaccaccaccactacggtgaccccaaccccaacacccaccggcacacagaccccaaccacgacacccatcaccaccaccactacggtgaccccaaccccaacacccaccggcacacagaccccaaccacgacacccatcaccaccaccactacggtgaccccaaccccaacacccaccggcacacagaccccaaccacgacacccatcaccaccaccactacggtgaccccaaccccaacacccaccggcacacagaccccaaccacgacacccatcaccaccaccactacggtgaccccaaccccaacacccaccggcacacagaccccaaccacgacacccatcaccaccaccactacggtgaccccaaccccaacacccaccggcacacagaccccaaccacgacacccatcaccaccaccactacggtgaccccaaccccaacacccaccggcacacagaccccaaccacgacacccatcaccaccaccactacggtgaccccaaccccaacacccaccggcacacagaccccaaccacgacacccatcaccaccaccactacggtgaccccaaccccaacacccaccggcacacagaccccaaccacgacacccatcaccaccaccactacggtgaccccaaccccaacacccaccggcacacagaccccaaccacgacacccatcaccaccaccactacggtgaccccaaccccaacacccaccggcacacagaccccaaccacgacacccatcaccaccaccactacggtgaccccaaccccaacacccaccggcacacagaccccaaccacgacacccatcaccaccaccactacggtgaccccaaccccaacacccaccggcacacagaccccaaccacgacacccatcaccaccaccactacggtgaccccaaccccaacacccaccggcacacagaccccaaccacgacacccatcaccaccaccactacggtgaccccaaccccaacacccaccggcacacagaccccaaccacgacacccatcaccaccaccactacggtgaccccaaccccaacacccaccggcacacagaccccaaccacgacacccatcaccaccaccactacggtgaccccaaccccaacacccaccggcacacagaccccaaccacgacacccatcaccaccaccactacggtgaccccaaccccaacacccaccggcacacagaccccaaccacgacacccatcaccaccaccactacggtgaccccaaccccaacacccaccggcacacagaccccaaccacgacacccatcaccaccaccactacggtgaccccaaccccaacacccaccggcacacagaccccaaccacgacacccatcaccaccaccactacggtgaccccaaccccaacacccaccggcacacagaccccaaccacgacacccatcaccaccaccactacggtgaccccaaccccaacacccaccggcacacagaccccaaccacgacacccatcaccaccaccactacggtgaccccaaccccaacacccaccggcacacagaccccaaccacgacacccatcaccaccaccactacggtgaccccaaccccaacacccaccggcacacagaccccaaccacgacacccatcaccaccaccactacggtgaccccaaccccaacacccaccggcacacagaccccaaccacgacacccatcaccaccaccactacggtgaccccaaccccaacacccaccggcacacagaccccaaccacgacacccatcaccaccaccactacggtgaccccaaccccaacacccaccggcacacagaccccaaccacgacacccatcaccaccaccactacggtgaccccaaccccaacacccaccggcacacagaccccaaccacgacacccatcaccaccaccactacggtgaccccaaccccaacacccaccggcacacagaccccaaccacgacacccatcaccaccaccactacggtgaccccaaccccaacacccaccggcacacagaccccaaccacgacacccatcaccaccaccactacggtgaccccaaccccaacacccaccggcacacagaccccaaccacgacacccatcaccaccaccactacggtgaccccaaccccaacacccaccggcacacagaccccaaccacgacacccatcaccaccaccactacggtgaccccaaccccaacacccaccggcacacagaccccaaccacgacacccatcaccaccaccactacggtgaccccaaccccaacacccaccggcacacagaccccaaccacgacacccatcaccaccaccactacggtgaccccaaccccaacacccaccggcacacagaccccaaccacgacacccatcaccaccaccactacggtgaccccaaccccaacacccaccggcacacagaccccaaccacgacacccatcaccaccaccactacggtgaccccaaccccaacacccaccggcacacagaccccaaccacgacacccatcaccaccaccactacggtgaccccaaccccaacacccaccggcacacagaccccaaccacgacacccatcaccaccaccactacggtgaccccaaccccaacacccaccggcacacagaccccaaccacgacacccatcaccaccaccactacggtgaccccaaccccaacacccaccggcacacagaccccaaccacgacacccatcaccaccaccactacggtgaccccaaccccaacacccaccggcacacagaccccaaccacgacacccatcaccaccaccactacggtgaccccaaccccaacacccaccggcacacagaccccaaccacgacacccatcaccaccaccactacggtgaccccaaccccaacacccaccggcacacagaccccaaccacgacacccatcaccaccaccactacggtgaccccaaccccaacacccaccggcacacagaccccaaccacgacacccatcaccaccaccactacggtgaccccaaccccaacacccaccggcacacagaccccaaccacgacacccatcaccaccaccactacggtgaccccaaccccaacacccaccggcacacagaccccaaccacgacacccatcaccaccaccactacggtgaccccaaccccaacacccaccggcacacagaccccaaccacgacacccatcaccaccaccactacggtgaccccaaccccaacacccaccggcacacagaccccaaccacgacacccatcaccaccaccactacggtgaccccaaccccaacacccaccggcacacagaccccaaccacgacacccatcaccaccaccactacggtgaccccaaccccaacacccaccggcacacagaccccaaccacgacacccatcaccaccaccactacggtgaccccaaccccaacacccaccggcacacagaccccaaccacgacacccatcaccaccaccactacggtgaccccaaccccaacacccaccggcacacagaccccaaccacgacacccatcaccaccaccactacggtgaccccaaccccaacacccaccggcacacagaccccaaccacgacacccatcaccaccaccactacggtgaccccaaccccaacacccaccggcacacagaccccaaccacgacacccatcaccaccaccactacggtgaccccaaccccaacacccaccggcacacagaccccaaccacgacacccatcaccaccaccactacggtgaccccaaccccaacacccaccggcacacagaccccaaccacgacacccatcaccaccaccactacggtgaccccaaccccaacacccaccggcacacagaccccaaccacgacacccatcaccaccaccactacggtgaccccaaccccaacacccaccggcacacagaccccaaccacgacacccatcaccaccaccactacggtgaccccaaccccaacacccaccggcacacagaccccaaccacgacacccatcaccaccaccactacggtgaccccaaccccaacacccaccggcacacagaccccaaccacgacacccatcaccaccaccactacggtgaccccaaccccaacacccaccggcacacagaccccaaccacgacacccatcaccaccaccactacggtgaccccaaccccaacacccaccggcacacagaccccaaccacgacacccatcaccaccaccactacggtgaccccaaccccaacacccaccggcacacagaccccaaccacgacacccatcaccaccaccactacggtgaccccaaccccaacacccaccggcacacagaccccaaccacgacacccatcaccaccaccactacggtgaccccaaccccaacacccaccggcacacagaccccaaccacgacacccatcaccaccaccactacggtgaccccaaccccaacacccaccggcacacagaccccaaccacgacacccatcaccaccaccactacggtgaccccaaccccaacacccaccggcacacagaccccaaccacgacacccatcaccaccaccactacggtgaccccaaccccaacacccaccggcacacagaccccaaccacgacacccatcaccaccaccactacggtgaccccaaccccaacacccaccggcacacagaccccaaccacgacacccatcaccaccaccactacggtgaccccaaccccaacacccaccggcacacagaccccaaccacgacacccatcaccaccaccactacggtgaccccaaccccaacacccaccggcacacagaccccaaccacgacacccatcaccaccaccactacggtgaccccaaccccaacacccaccggcacacagaccccaaccacgacacccatcaccaccaccactacggtgaccccaaccccaacacccaccggcacacagaccccaaccacgacacccatcaccaccaccactacggtgaccccaaccccaacacccaccggcacacagaccccaaccacgacacccatcaccaccaccactacggtgaccccaaccccaacacccaccggcacacagaccccaaccacgacacccatcaccaccaccactacggtgaccccaaccccaacacccaccggcacacagaccccaaccacgacacccatcaccaccaccactacggtgaccccaaccccaacacccaccggcacacagaccccaaccacgacacccatcaccaccaccactacggtgaccccaaccccaacacccaccggcacacagaccccaaccacgacacccatcaccaccaccactacggtgaccccaaccccaacacccaccggcacacagaccccaaccacgacacccatcaccaccaccactacggtgaccccaaccccaacacccaccggcacacagaccccaaccacgacacccatcaccaccaccactacggtgaccccaaccccaacacccaccggcacacagaccccaaccacgacacccatcaccaccaccactacggtgaccccaaccccaacacccaccggcacacagaccccaaccacgacacccatcaccaccaccactacggtgaccccaaccccaacacccaccggcacacagaccccaaccacgacacccatcaccaccaccactacggtgaccccaaccccaacacccaccggcacacagaccccaaccacgacacccatcaccaccaccactacggtgaccccaaccccaacacccaccggcacacagaccgggccccccacccacacaagcacagcaccgattgctgagttgaccacatccaatcctccgcctgagtcctcaacccctcagacctctcggtccacctcttcccctctcacggagtcaaccacccttctgagtaccctaccacctgccattgagatgaccagcacggccccaccctccacacccacggcacccacgaccacgagcggaggccacacactgtctccaccgcccagcaccaccacgtcccctccaggcacccccactcgcggtaccacgaccgggtcatcttcagcccccacccccagcactgtgcagacgaccaccaccagtgcctggaccccaacgccgaccccactctccacacccagcatcatcaggaccacaggcctgaggccctacccttcctctgtgcttatctgctgtgtcctgaacgacacctactacgcaccaggtgaggaggtgtacaacggcacatacggagacacctgttatttcgtcaactgctcactgagctgtacgttggagttctataactggtcctgcccatccacgccctccccaacacccacgccctccaagtcgacgcccacgccttccaagccatcgtccacgccctccaagccgacgcccggcaccaagccccccgagtgcccagactttgatcctcccagacaggagaacgagacttggtggctgtgcgactgcttcatggccacgtgcaagtacaacaacacggtggagatcgtgaaggtggagtgtgagccgccgcccatgcccacctgctccaacggcctccaacccgtgcgcgtcgaggaccccgacggctgctgctggcactgggagtgcgactgctactgcacgggctggggcgacccgcactatgtcaccttcgacggactctactacagctaccagggcaactgcacctacgtgctggtggaggagatcagcccctccgtggacaacttcggagtttacatcgacaactaccactgcgatcccaacgacaaggtgtcctgtccccgcaccctcatcgtgcgccacgagacccaggaggtgctgatcaagaccgtgcatatgatgcccatgcaggtgcaggtgcaggtgaacaggcaggcggtggcactgccctacaagaagtacgggctggaggtgtaccagtctggcatcaactacgtggtggacatccccgagctgggtgtcctcgtctcctacaatggcctgtccttctccgtcaggctgccctaccaccggtttggcaacaacaccaagggccagtgtggcacctgcaccaacaccacctccgacgactgcattctgcccagcggggagatcgtctccaactgtgaggctgcggctgaccagtggctggtgaacgacccctccaagccacactgcccccacagcagctccacgaccaagcgcccggccgtcactgtgcccgggggcggtaaaacgaccccacacaaggactgcaccccatctcccctctgccagctcatcaaggacagcctgtttgcccagtgccacgcactggtgcccccgcagcactactacgatgcctgcgtgttcgacagctgcttcatgccgggctcgagcctggagtgcgccagtctgcaggcctacgcagccctctgtgcccagcagaacatctgcctcgactggcggaaccacacgcatggggcctgcttggtggagtgcccatctcacagggagtaccaggcctgtggccctgcagaagagcccacgtgcaaatccagctcctcccagcagaacaacacagtcctggtggaaggctgcttctgtcctgagggcaccatgaactacgctcctggctttgatgtctgcgtgaagacctgcggctgtgtgggacctgacaatgtgcccagagagtttggggagcacttcgagttcgactgcaagaactgtgtctgcctggagggtggaagtggcatcatctgccaacccaagaggtgcagccagaagcccgttacccactgcgtggaagacggcacctacctcgccacggaggtcaaccctgccgacacctgctgcaacattaccgtctgcaagtgcaacaccagcctgtgcaaagagaagccctccgtgtgcccgctgggattcgaagtgaagagcaagatggtgcctggaaggtgctgtcccttctactggtgtgagtccaagggggtgtgtgttcacgggaatgctgagtaccagcccggttctccagtttattcctccaagtgccaggactgcgtgtgcacggacaaggtggacaacaacaccctgctcaacgtcatcgcctgcacccacgtgccctgcaacacctcctgcagccctggcttcgaactcatggaggcccccggggagtgctgtaagaagtgtgaacagacgcactgtatcatcaaacggcccgacaaccagcacgtcatcctgaagcccggggacttcaagagcgacccgaagaacaactgcacattcttcagctgcgtgaagatccacaaccagctcatctcgtccgtctccaacatcacctgccccaactttgatgccagcatttgcatcccgggctccatcacattcatgcccaatggatgctgcaagacctgcacccctcgcaatgagaccagggtgccctgctccaccgtccccgtcaccacggaggtttcgtacgccggctgcaccaagaccgtcctcatgaatcattgctccgggtcctgcgggacatttgtcatgtactcggccaaggcccaggccctggaccacagctgctcctgctgcaaagaggagaaaaccagccagcgtgaggtggtcctgagctgccccaatggcggctcgctgacacacacctacacccacatcgagagctgccagtgccaggacaccgtctgcgggctccccaccggcacctcccgccgggcccggcgctcccctaggcatctggggagcgggtgagcggggtgggcacagcccccttcactgccctcgacagctttacctcccccggaccctctgagcctcctaagctcggcttcctctcttcagatatttattgtctgagtctttgttcagtccttgctttccaataataaactcagggggacatgc

SEQ ID NO: 83 - DNA, 7367 bp, homo sapiens
atagctctgtcggcgccgcggtgtccacctcagtcaggccacggtggaagacgcgtgccgcggcgcctggttgcctgcagcggcccggacccgagaggaagctgaaccatctatctccagaaatgtcttcagaaagtaaagagcaacataacgtttcacccagagactcagctgaaggaaatgacagttatccatctgggatccatctggaacttcaaagggaatcaagtactgacttcaagcaatttgagaccaatgatcaatgcagaccttatcataggatccttattgagcgtcaagagaaatcagatacaaacttcaaggagtttgttattaaaaagctgcagaagaattgccagtgcagtccagccaaagccaaaaatatgattttaggtttccttcctgttttgcagtggctcccaaaatacgacctaaagaaaaacattttaggggatgtgatgtcaggcttgattgtgggcatattattggtgccccagtccattgcttattccctgctggctggccaagaacctgtctatggtctgtacacatctttttttgccagcatcatttattttctcttgggtacctcccgtcacatctctgtgggcatttttggagtactgtgccttatgattggtgagacagttgaccgagaactacagaaagctggctatgacaatgcccatagtgctccttccttaggaatggtttcaaatgggagcacattattaaatcatacatcagacaggatatgtgacaaaagttgctatgcaattatggttggcagcactgtaacctttatagctggagtttatcaggtagcgatgggcttctttcaagtgggttttgtttctgtctacctctcagatgccttgctgagtggatttgtcactggtgcctccttcactattcttacatctcaggccaagtatcttcttgggctcaaccttcctcggactaatggtgtgggctcactcatcactacctggatacatgtcttcagaaacatccataagaccaatctctgtgatcttatcaccagccttttgtgccttttggttcttttgccaaccaaagaactcaatgaacacttcaaatccaagcttaaggcaccgattcctattgaacttgttgttgttgtagcagccacattagcctctcattttggaaaactacatgaaaattataattctagtattgctggacatattcccactgggtttatgccacccaaagtaccagaatggaacctaattcctagtgtggctgtagatgcaatagctatttccatcattggttttgctatcactgtatcactttctgagatgtttgccaagaaacatggttacacagtcaaagcaaaccaggaaatgtatgccattggcttttgtaatatcatcccttccttcttccactgttttactactagtgcagctcttgcaaagacattggttaaagaatcaacaggctgccatactcagctttctggtgtggtaacagccctggttcttttgttggtcctcctagtaatagctcctttgttctattcccttcaaaaaagtgtccttggtgtgatcacaattgtaaatctacggggagcccttcgtaaatttagggatcttcccaaaatgtggagtattagtagaatggatacagttatctggtttgttactatgctgtcctctgcactgctaagtactgaaataggcctacttgttggggtttgtttttctatattttgtgtcatcctccgcactcagaagccaaagagttcactgcttggcttggtggaagagtctgaggtctttgaatctgtgtctgcttacaagaaccttcagactaagccaggcatcaagattttccgctttgtagcccctctctactacataaacaaagaatgctttaaatctgctttatacaaacaaactgtcaacccaatcttaataaaggtggcttggaagaaggcagcaaagagaaagatcaaagaaaaagtagtgactcttggtggaatccaggatgaaatgtcagtgcaactttcccatgatcccttggagctgcatactatagtgattgactgcagtgcaattcaatttttagatacagcagggatccacacactgaaagaagttcgcagagattatgaagccattggaatccaggttctgctggctcagtgcaatcccactgtgagggattccctaaccaacggagaatattgcaaaaaggaagaagaaaaccttctcttctatagtgtgtatgaagcgatggcttttgcagaagtatctaaaaatcagaaaggagtatgtgttcccaatggtctgagtcttagtagtgattaattgagaaggtagatagaagaatgtctagccaataggttaaaatttcaagtgtccaacatttcccagttccacagtgggaaattttgcacacttgaaattttaaccaagtggctagatattattcctcctttgaagctaatggcatttgtatatacacactgcagcagagcttgtagctggacagagtcaaaaagaagaaaatacggtttcaggctttcttgcagatatgaagtattcttggaatgcaataagtatgtattgaactgtactgtaaagtagctccaaaacttaattactctcctgttttaggggttatacatttggactgtgcattctccaagagatgaagcggtgaagttgggatttacattggaagtgctgtagacttctttatgtggctcagtggagagagggaaagaatgttgcacctgctctagtaccataggtcaagaggcttctggatcacaaagtcataactagacaggtttgttcttgtagttttctatccccagtctttgctccccagatggcagtagtttttagtaggaaagtgccattcctgtccttaaggcacagtctcatcagaagtctaatacctgggcaggtttataacatcctgagagccagcctgacattagacagaataccctttgtaatacattggaaatttttactcatgcctttttgtttaggataaataggtaagcacaaagagctcttcaaaatcagaaaaaacaataggagtccttccttgtcttttctgtgatctctgtccttgtttctgagactttctctaccattaagctctattttagctttcagttattctagtttgtttcccatggaatctgtcctaaactggtgtttttgtcagtgacagtcttgccagtcagcaatttctaacagcattttaaatgagtttgatgtacagtaaatattgatgacaatgacagcttttaactcttcaagtcacctaaagctattatgcaggaggatttagaagtcacattcataaaacccaagtgctatgggtgtattattcatgatagctggcccacaggtcatgaattgaggaggaatttgctttcaaaaagcaagaatgtccaacactgaaagtttatagttttatatttggaccttgaaaggtaagaaaaaaccaggttctccaaagttaggaatagggaactaatttatgaaacagccatcttaaaaaaaaaaaaagtaaactgcaaaagtacaaaatcatttttcaatctgttcccagtttctaaacaattttaaatatttatgagaagcaaaccctatgtgtagggcatctgttggagtgggatgcttttagacatatattaagtatgtacatgtttaatatgtatatttaaaatgcatatatattttattatatctatattatcctatatagatatatgtaacttagctttattgttagctccataagctgccagtgttgcttttctgttggtagagctctcccatttggtgacatggaaaatacctttccattatcacaacaaagcagttgctcagtagaaagtctagatttctgtcttataggtgatttctgtcttataggtgattataatcaagtgtaggcttcctgaattttgacatccttttagaacttgggtctggaattccagaaatgttaattgctgcttgtatttgttcttgtttgttttttagccagtatttgccctttctatccagccttatgaataatagcagtaaaatcacagtatcttggtcagtctttatttttttccttttttcttttttaagagacagtcatccaggccagagtgcagtttgatgatagcttactgaagcttcccactcctgggctcaagttatccttccattttggcctcctgagtagctagaccataggtatgcatcaccacaccctgctaattttttaaatttttttctagagagagggtctcactgtgttgcccaggctggtctcaaactccaggctcaagcaatccttcactcatgcctgtaatcccagcacgttgggaggccgaggcgggtggatcacctgaagtcaggagttcgagaccatcctggctaacactgtgaaaccccgtctctactaaaaatacaaaaaattagcggggcatggtggcacgcgcctgtagtcccagctactcaggaggctgaggcaggagaattacttgaacccgggaggcggaggttgcagtaagcagagattgtgccactggactccagcctgggtgacagagcgagactccgtctcaaacaaacaaacaaaaaactgttttcatttgctctcttgaccaaaggataggactttagttctttaagcattattttaaacactatattgatacaaaaatatcttgcttactctaaactttagagtctaaatgaagctttttctcagtacaagattctgagtatcataaaatggttatttaattgaaacgtagtgtggtatactcttgatggttagaactcttacagccttatttatttttaagtttgttacagccaaagggttggagtgtgccagtgcacaggtagactaaggaaaacattatagaggagtgaagagaacagaccattgaaaagactattatctgaccagcggaggcagaaaagagaggaacccagttgaataggatccaatccctggttagcctctacacaataatagggagacaaggattaggagccatacctcccagagcaaggtatctttctagagcaaatttctctttctagaaggggagggtcacagggtcacagattcaccaaagctgaaagggctgaggagctcatggtagcctgggttgacctactctggagcacggtgtcttccttctaaactgagtgactgtagtactatctgtgcctctgatggtaataaaactgacaagatgtctaatttttttttaagtaggaccaaaggaaaacaagatttagatagtctgactttgcttttgaacaacagacattgcaagtcaaaattgttgtcaaatttacatatggtaaatgatgaactttaaaaatgtgtccaggtgttagatgagttcattagactcttttaatgctaatggctagtacgtttaaacaaaacagcagttctctgctgcaatattcccattgaccacttaaatgaccataagtggtcatttaagaacatgttagggttagccctgatctgaatataaaagtgagaaaagggctacagtgcatttcttggtaacttaaactgagtcttgaagttataatgatccattcgagttctgtgatccttattgttcttaattgtgtttctctacgtattgttacagatgagccatacgtttctttgtatcaatgtagacatgacttcagatacctctgaggacctacccagcagtctaggaccctgggccaagtgctgggactatggtactaaatccagtagatgggctgtgtagcaactctcccagggaacacactagggtacttagggaggtgctttgtggagcatgttgaagctttgagatctgagcaggaggcagtgatgtccctggtctattcagggaaagatttcagtgtgaaatggtaaacatccaattgacaggatttagattttgcttagtttttctgctttttaatgtttctatcccccatctcagtgttttctttatccatcccagtgatgccttatttgaaactgggcttaaactgcaaaaagaatgaagttggatttaggaagctgttagatcattgagtggtgttgagagtgaagtttcactagcagggaagtttccttgagcctaaaataaaaagaaaaaattaaaaagaatcagtttttttaattaaaaaaatagaaagctgttaggctcctaattcgtggggtttttttttgtaaaaacagtttagataatcctgaatgcaatcattaacttggttgctaattacaagaatgaaaattataatggaaaaggacaaaataatataccagctggtttgttattatagtccgtgtattaaaatactattgaaatacgttaaaggtaaatttttaaggtttaaaaaaaatttagtaacttacagggatggagaatttagatgtcagaggtggggagatttatttttataaggtaatttttatcctgataaggacttaaaaaaaagttttgcaactgaaattttaaagtaaacatgttaagtacagttaaaaagtaagcattgtagtaaatagtggattctctggtgtgtattttttatctcagtgttgaaaattggaaaagaatggactgaagtctaaaaactggaataatgaaggacactaaatgcctttattgtagatactatgtttgtaagtctatagctaagcaacttaagccaaaaaggtctttcaactgaagctttaatcaacttattttggagatgttctcttcccttatctcatgcgtcatccctaaaataataagatacatgggatcaaatagcccttgccttttcaacacaaatcagttggaaaattatggtttgagtcctgttgctgccatggcttctgtttctcagaaatgagtgtgtatgaacataccaatctatgtaataggctacctttttttgtcttctttggaactttgtacacaaaccaagacaatatcagggtgacaggtgaatgaacttaaattctcagtcttgtctattcaccaaaaaagtatactgcctgttttttctttaattattcaaggttgatgacttttaggaacatgttttatactgtattttttaattaaagcaagtgccttgatgtaattccatgtaaatcattgcttaaccctcttatgggatgaggatgagttattaatgtattgcagcctactggaaaggagggggagttggttaatagcagatacttttcttctagaagcttatgttttatgctgtttattatgtaagatcctgtatgtgtgttgagatttagaggtttcatttgttttgtctgctaataaattgttactctaataataaaaaaaa

SEQ ID NO: 84 - DNA, 3610 bp, homo sapiens
gaattcttcgtaggaattatcttttccctcctctcacccgacagcctgcctatttccaaaggaaaaaaaaaaagcgtgttgagtacgttctggattactcataagaccttttttttttccttccgggcgcaaaaccgtgagctggatttataatcgccctataaagctccagaggcggtcaggcacctgcagaggagccccgccgctccgccgactagctgcccccgcgagcaacggcctcgtgatttccccgccgatccggtccccgcctccccactctgcccccgcctaccccggagccgtgcagccgcctctccgaatctctctcttctcctggcgctcgcgtgcgagagggaactagcgagaacgaggaagcagctggaggtgacgccgggcagattacgcctgtcagggccgagccgagcggatcgctgggcgctgtgcagaggaaaggcgggagtgcccggctcgctgtcgcagagccgagcctgtttctgcgccggaccagtcgaggactctggacagtagaggccccgggacgaccgagctgatggcgtcttcgaccccatcttcgtccgcaacctcctcgaacgcgggagcggaccccaataccactaacctgcgccccacaacgtacgatacctggtgcggcgtggcccatggatgcaccagaaaactggggctcaagatctgcggcttcttgcaaaggaccaacagcctggaagagaagagtcgccttgtgagtgccttcagggagaggcaatcctccaagaacctgctttcctgtgaaaacagcgaccgggatgcccgcttccggcgcacagagactgacttctctaatctgtttgctagagatctgcttccggctaagaacggtgaggagcaaaccgtgcaattcctcctggaagtggtggacatactcctcaactatgtccgcaagacatttgatcgctccaccaaggtgctggactttcatcacccacaccagttgctggaaggcatggagggcttcaacttggagctctctgaccaccccgagtccctggagcagatcctggttgactgcagagacaccttgaagtatggggttcgcacaggtcatcctcgatttttcaaccagctctccactggattggatattattggcctagctggagaatggctgacatcaacggccaataccaacatgtttacatatgaaattgcaccagtgtttgtcctcatggaacaaataacacttaagaagatgagagagatagttggatggtcaagtaaagatggtgatgggatattttctcctgggggcgccatatccaacatgtacagcatcatggctgctcgctacaagtacttcccggaagttaagacaaagggcatggcggctgtgcctaaactggtcctcttcacctcagaacagagtcactattccataaagaaagctggggctgcacttggctttggaactgacaatgtgattttgataaagtgcaatgaaagggggaaaataattccagctgattttgaggcaaaaattcttgaagccaaacagaagggatatgttcccttttatgtcaatgcaactgctggcacgactgtttatggagcttttgatccgatacaagagattgcagatatatgtgagaaatataacctttggttgcatgtcgatgctgcctggggaggtgggctgctcatgtccaggaagcaccgccataaactcaacggcatagaaagggccaactcagtcacctggaaccctcacaagatgatgggcgtgctgttgcagtgctctgccattctcgtcaaggaaaagggtatactccaaggatgcaaccagatgtgtgcaggatatctcttccagccagacaagcagtatgatgtctcctacgacaccggggacaaggcaattcagtgtggccgccacgtggatatcttcaagttctggctgatgtggaaagcaaagggcacagtgggatttgaaaaccagatcaacaaatgcctggaactggctgaatacctctatgccaagattaaaaacagagaagaatttgagatggttttcaatggcgagcctgagcacacaaacgtctgtttttggtatattccacaaagcctcaggggtgtgccagacagccctcaacgacgggaaaagctacacaaggtggctccaaaaatcaaagccctgatgatggagtcaggtacgaccatggttggctaccagccccaaggggacaaggccaacttcttccggatggtcatctccaacccagccgctacccagtctgacattgacttcctcattgaggagatagaaagactgggccaggatctgtaatcatccttcgcagaacatgagtttatgggaatgccttttccctctggcactccagaacaaacctctatatgttgctgaaacacacaggccatttcattgagggaaaacataatatcttgaagaatattgttaaaaccttacttaaagcttgtttgttctagttagcaggaaatagtgttctttttaaaaagttgcacattaggaacagagtatatatgtacagttatacatacctctctctatatatacatgtatagtgagtgtggcttagtaatagatcacggcatgtttcccgctccaagagaattcactttaccttcagcagttaccgaggagctaaacatgctgccaaccagcttgtccaacaactccaggaaaactgtttttcaaaacgccatgtcctaggggccaagggaaatgctgttggtgagaatcgacctcactgtcagcgtttctccacctgaagtgatgatggatgagaaaaaacaccaccaaatgacaagtcacaccctccccattagtatcctgttaggggaaaatagtagcagagtcattgttacaggtgtactatggctgtattttagagattaatttgtgtagattgtgtaaattcctgttgtctgaccttggtggtgggaggggagactatgtgtcatgatttcaatgattgtttaattgtaggtcaatgaaatatttgcttatttatattcagagatgtaccatgttaaagaggcgtcttgtattttcttcccatttgtaatgtatcttatttatatatgaagtaagttctgaaaactgtttatggtattttcgtgcatttgtgagccaaagagaaaagattaaaattagtgagatttgtatttatattagagtgcccttaaaataatgatttaagcattttactgtctgtaagagaattctaagattgtacatgacataagttatagtaatcatggcaaatcctgttacttaaatagcatctgctcttctcttacgctctctgtctggctgtacgtctggtgttctcaatgcttttctagcaactgttggataataactagatctcctgtaattttgtagtagttgatgaccaatctctgtgactcgcttagctgaaacctaaggcaacatttccgaagaccttctgaagatctcagataaagtgaccaggctcacaactgtttttgaagaagggaaattcacactgtgcgttttgagtatgcaagaagaatataaataaataaaatatctcatggagattgacaaaaaaaaaaa

SEQ ID NO: 85 - DNA, 7313 bp, homo sapiens
ggcagcgcatacactacaatggctgctggaaagaggcgtaaggaaacaatttccaggcccgccgcgtccagcccgaaatatgagaaaaaaattattagaaattccgcgggcggtgtagaggcggcggacgggccggagggaggatgttaaagccccgcggttgcctcttggtgctgccttggccgtatttggcacccagaatgcttcattctgtgacggtctattaataaggttgccttgctagagtttggagcagggcctcagattggccaaaatgggaaggattggattccactctcttccacgaagagtcaatgggactggctaagatcaaagtctgaggctttttccatcagtaatcagtccctttttgctttcttttacgaccacatgaaacttgagaagccacctaaagctatatcatttagtggagttgggcagttcccaagtgtccaacaagaaggcctggtttaggctgcgatggccactgtcattcctggtgatttgtcagaagtaagagatacccagaaagtcccttcagggaaacgtaagcgtggtgaaaccaaaccaagaaaaaactttccttgccaactgtgtgacaaggcctttaacagtgttgagaaattaaaggttcactcctactctcacacaggagagaggccctacaagtgcatacaacaagactgcaccaaggcctttgtttctaagtacaaattacaaaggcacatggctactcattctcctgagaaaacccacaagtgtaattattgtgagaaaatgtttcaccggaaagatcatctgaagaatcacctccatacacacgaccctaacaaagagacgtttaagtgcgaagaatgtggcaagaactacaataccaagcttggatttaaacgtcacttggccttgcatgccgcaacaagtggtgacctcacctgtaaggtatgtttgcaaacttttgaaagcacgggagtgcttctggagcaccttaaatctcatgcaggcaagtcgtctggtggggttaaagaaaaaaagcaccagtgcgaacattgtgatcgccggttctacacccgaaaggatgtccggagacacatggtggtgcacactggaagaaaggacttcctctgtcagtattgtgcacagagatttgggcgaaaggatcacctgactcgacatatgaagaagagtcacaatcaagagcttctgaaggtcaaaacagaaccagtggatttccttgacccatttacctgcaatgtgtctgtgcctataaaagacgagctccttccggtgatgtccttaccttccagtgaactgttatcaaagccattcacaaacactttgcagttaaacctctacaacactccatttcagtccatgcagagctcgggatctgcccaccaaatgatcacaactttacctttgggaatgacatgcccaatagatatggacactgttcatccctctcaccacctttctttcaaatatccgttcagttctacctcatatgcaatttctattcctgaaaaagaacagccattaaagggggaaattgagagttacctgatggagttacaaggtggcgtgccctcttcatcccaagattctcaagcatcgtcatcatctaagctagggttggatcctcagattgggtccctagatgatggtgcaggagacctctccctatccaaaagctctatctccatcagtgaccccctaaacacaccagcattggatttttctcagttgtttaatttcatacctttaaatggtcctccctataatcctctatcagtggggagccttggaatgagctattcccaggaagaagcacattcttctgtttcccagctccccacacaaacacaggatcttcaggatcctgcaaacactatagggcttgggtctctgcactcactgtcagcagctttcaccagcagtttaagcacaagtaccaccctcccacgtttccatcaagcttttcagtaggattctgggacatggattcattacagaaatgtatgtgtagctgtgccctagatgaccatttttattttagtgcctactttaaaacagtataaaaatttctgcttttgtataatacaaattttcattaagccagtataaaatagaaactagcttttaaactgagctttggaaccatttgtgttcagttaagtttacctgggtattttgtcctgattcactgccaattgtcacattttaagactttttttttttccatataggaaagccattattagtagtaaacttttacaaatcccattttcaaattacttttagatcttaaaattttcatttttgtctaataacagtggctctaccttttgacatctggctcattaaaaaatttagcaatagaatgtaaattgtataaaaagtttgtgaataactcaagggtttaaattttcttactagcttctaaatggattaataatcaagtgcttcaaatgaattaagagtccagtttcggaagataataaatgtttgttagatacaccataatttcagatcagtatattctgaagactctctgttgtctggctaaaatatttgccatctttattatgagcctttaaggaaaacaaaccctaaacacaaagcatcagtatttatagcaaaaagagactctgttaggtgacatggcatttcgtgtcacttaatagttggccctaaattagtacacaggatattttgtcgtgtttcatccttcttaacatgctatcttttcatttaataatagtaatagtgtatggcattggggtcttcagagtcgatatataggtagatctctttagtcttttccacctttcacatccaaggggtgggtcaagtgcagccagcaatttattttcattgttggcccacggttagtccataatctagagccattgtggaactgcagccatgaggtgtgtttatcccacagtggattgactcagcctctgtgggtgacagacttctaagcaggaagatagacgtgaagcacatggttacatttgggaacttgtgtagggatcatggcccctgtagccagggttaaaaactggactttttagaagtaaagtaaaagcatagcgcttatatcatttcttgctgaatttgatatgtttttctttcccttaagaatcaaaagcagaaaacaaaaacaacagtcctactccgatgttatctttctgattcaatgtgaatccatctttccttgcaatattttggatggagaatttgaagttaaatgcattagaaaactacctgatgaactaccacaaagttttaagtgactagaaatatatacagtaaaatcccactttcatgcatctctgggaaatgataggagtattgcaaataagttgagtttgtagagggtaacaaagtaaagtaaaacaaacctatcttggttaacatgaaaataacaattgagaatatattatattcactgaataattataggcttttcctcacattagacaaccaacataatcttcttaaaggtctaattaatatatttttctaagggtcagttgggacattaacctaagaaacatatctattaagcacttgttaacaccttattttaggaccctttccgttggggatgggggcaagggtgggaggtttttagaagagtatatatctctttaaaaaaaaacagaaagaaaaatatttctgagcactcattagccctatatggaaacttctttcctttttgtagggccagttatcactgcagattgcaatgtttaccaagaatttctaaaaatgagtgcagattactgaatataatacattatttaaaatatttgggagtagtataatttgttgagaaatgtaaattgtaataatgtaaatggggggcttcaatatatatatataatacacacacacacacacatgcacacataccgcacttcatagaatcaaagttgctctctgaaggagctttggctcctgatattttatcatgctcctatatttttttaatccttggagcagtagtttttatacttatgtatttaaattttattatgaaaaattacatttattaaaaaagtgtgttccaaaggcattaaaattatatatgttaataaggaagtacatttttaaatttttcaaactgctcctagcttttgattaggagaatattttttctgaaagtaggcttttcgctctgcttcattactgcttcctttagtttctatgaaacagattgcttacctaaatctttagttgaatgattagtgttcaatattgctttaatcaccatataaaaggaaaaaaattggtgacagagcacaaatagaaaacctatttttaaatagaaatcacaaatagcaagtgtggaagcactactttattctgtttaaaatgtacttaagaagtcatcaaattagtgaactgagacattggccttagtaggctgtattcactgctaatttaaaaaagggagtaccaggatttattaagtaaagcattttggaaatggggaatagcgccatatatgtatgtatgtgtatgtgtgtgtgtggtgtgtgtatatatacacacacacatacatacttaaatcttgccctgcatgaaattcaaatacatggaggcacatcttcagggcaccagtgttaaaattttggagtcttaattttcatgtgtacacctctttgcctgttcccacccccagacttgaaataacacttcagagtaagagggaattcagctaatttgtttttaaaattgactgtagtggtcactaaaccctttttgagagaatttctattaaagatgaggcagactcgcttatttgaattgcacaatgttctaacaaggatgtaacacagaattggcttttttttccctagaaaaagattgtttgtttctatgtcaactagatatgattaaaaataagtattgccaatgctgttttcattctctagtggccagaatcattatccttgaaatttctggtagtgccttagcttggttaaaaaaaaaaaaaaaaaaaaaaaaaaagggattaacattaaataaaagtagtttagaatttgggcctcagacaagatattgaacctcattcagtttcacttccacatgtatgtacaagttaggtcaccaaacacggaagttgagtgtggaaggatcttggcactgtaagcaatgctatccattgatgtatacaagtacctttatagttatcgatcactgttaaaactttcattttaaaatcctattaccaagttcagttttttaaaacttcaattgtcctggctgattatgcatcactctgtgtgcaacttttttatttcatttagtgtttctttcaagctgtgtatttttgcctatttgttgcttgtgctttatttttcttagtcatttgtggaatatagtgatatattgtgttaatttggacagtagcggtttttaaaaaccatatactgactgaaacatgagccagagccgattgctttattaagctaataatgaatgttaaagagtacatattttcaggatcgttcatctagtgagcaatacacatattataggccaatatttttttaaaaaatagagcttggtcaacctctatactacacatattacaagatatagcactttcaaaatgaatctaaacctttacagaaactttcttataggttatgccttttattttaagacttattataattcaagtgccattagatgatatatatgtaggcctttgatatataatgctttgtgtacaaaaatggtagatggtattttaaacaggtacatttttacagtgttttcttatcaatttgctatattgcacagaatcagtgtgtgtcttttcataaggttttacaatggtttatttttttacaaggtttacgtgtctcaaagcacactgtcttcccagtacgtaagttaaaaaataccagttcacccaagttgcttctagcctactgagatccatgtgacattggaggagatcttttaaatgtttagtattcgtcattagcaatggctggctgttagttctggtaaatgtgtgcctaagttgaatttgtcttgtttttctcacactgtgtcagcagccatgtctacaacacagataagtctgttgtgatcacatagatctacataagttgtgcagttttgtgctaaaaacccatagggagctcctttgggatcatagaaaagaagatcatgcaaccagcattggtgaaggcacactcagattgcacttagggcctttctatgatgttgtcaaccctctgaggatggaaggcagtgtcttttgatgttatctagcctagaaatgacacagaactattgctaatgtataaaacacttcattatataagcttcagtggtacagatgaaccagaatgaatgtttatcttctcagaaacactccttcaatattatattggatcatgctgctaatgtaacttgggctacaactcttcatggtgctacaaacttctctgtctcattcagtcgtatttttttatccatagaaaaaggactacattaggtgtaaaagtgtacaatatatttttatactgtgacttaatttgtcattaacaaacttttacaccaccacaatgtattcatgtgcacttgcaaaaggagatctcggacatgcaaatgttaccagaacaaacccagcttttgtccacaaggtgactgtaactcagaatggaaagtgggctttataatagggtgtggagtgaagaacatgctgtatgttactaacagccctttgaatttaacaaaaactgggaatccattaggaaacggattgcatcatacctgaacataagctggactgctgaaattgtatttttagctaatgaaaaagtgtttggactagtactctaaaaatgttctaatgataaagttttgagtcaaaatagaaaagaaaaaaatctgcattccaggccgaattttgtatatttttattgcatttaaaattgctattctgtaatattgggaaatcaagtggcttatcatgtatatcgtgtacttaaaatgtattcacaaactactgttgtatttgtataaaatatagacaaagatcatattttttgtgtgtgtataagctctgtaaaatagcaatcacattatgaagctgcagtgatactacattttaaacattcacatccaaagaagcagactatttattgtccatataccagatttaaaatattaatttgctgctaattaaataatagtactgcagcttcttgtggcctacagtgttatgtttgctgtaagaataagatatgtgaattccacaaaatatatgaataaaatctcgtgcc

SEQ ID NO: 86 - DNA, 4430 bp, homo sapiens
acaactttgtgttttgttgttgtgttgtgttttctctttcagtttcaaagaagctggcaccgattccacccaaggtcccctttggccagccgggggctatggcagaccagtccgctggccagccgtccccagtcagcctgtcccccacccagcccagcaccccgtcaccctatggactgagctaccctcaggggtactccttggcctcgggccagctctccccagctgcagctcctcccctggcctctccttctgtctttacaagcactttgagcaaatcgcggcccactcctaagccgcgacagagacctactctgccgcctcctcagcctcccacagtaaacctctcggcctctagtccacagtccacggaggcccccatgctagatggcatgtcccctggggaaagcatgtctacaggtaaccaagccacaggctccctcacttttttttatgaactttagtgaaatgtgcctaggggatggattgctagagttactgccagtgaacacattcctgcgtgctttgggatgactgggctggcaccaggggtagctcataagatctccttagaagcccaccaatggaaagcaaccctggaatccatgtgtcccacacaggggcttcttatgggatctctctcggtctaagcccaccagcctggggttctgtttttgctcttattatcgggggttgaagacactgagtcatttggagtggggcctcaggagaggctggaagctggttatgatcacaaaacagcatcaaaactcaggtatttcctggatagagcccaagcaactgacaggtataaatgcttatctggagaacaggggctaagaacccaagatgtttttttactattactaaaataagccttgctagaaaaatatacttccagatagatatttagagaggggtgaatttcagaaaacatgcatgtctccattctcctccaccagactcccctccctggccaattccctgaggagctaattggacaaacccacaacgacttaatttagtttgggcttaaatttagaaacaaagacggagctctcttcccccagaaaaatctgtaagcacaaaatcgcaaacacacaccacgtttagccaaaaccattcattggctggaaggaacgggatgtttttggaacatctccccagacacttcaaccacataagattataaagtcaggggcctatttgtggtggctgctaaagtcatttgagcattttccttgttcagggagacaggcacagggttgagccgtgtcttgggctagagccaacccacttagtaaagtgcagtagcatggcggtgagctggagcatatgtgtacctagtgttgtcccaagtagcagaaggtgaggcagcttgggttggaacacacacaccacatacacacacacccactcacccatttcaaagaacagtgctgtcctaggatgcactgggacttttgtgataatgcacttttccctccacgtccttctccaaaagagtgatttatttcttccgtgattagacggaagcagtgaccctgtggggttcagctccgtgctgcctttgaaaaggctagtccaatttgcaagtgtttgtactgggtcagatttaaatattacggggaagagccatctggtgattcggcttctttatttttggatgtgattaatgttgaaggtacaagctgctgtcatctaccccgaggcttattaaaaattaggcaaatttctccctggaaaatgcagtagcaccacgcccatcttggtgggtcttggtgctgaggtgtctcctgaaggagcccatgataggagggcacaggcttgctgccctcggggaaggtcacagctgcggaggagctgaaggtcacccgagccaggtctccagggctgctcctcccagtgtgtcacatctggtgactcttccagccaccccagggaagggacacaaggtagtgtcaatacataagcaatagaatgagcagaagatggccaggcacggtggctcacgcctgtaatcccagcactttgggaggccgaggagaattagttgggcatggtggcacgtgccactagtcccagctacttgggaggctgaggtaggagaattgcttgaacctgggaggtggagccgagattgtgccactgcattccagcctggcaacagagcgatactccacctcaaaaaaaaaaaaaaaaaaaaaaaaagaatgagcagaagatatcaatggagaagcagataagagcagaaggagaggagaaattggggaacaaaagtgggcaacagaaggcctgggaggacagcacccccagggctctaagaagcggagtggctcatgttccatcttacaggtttaagaactcctgaccttcaggattcataatgtccctcgccctgtgcggaccctattttaatgtccttttggcagcagactgttgttttgtcccatacgttcaggtctctgagccagtgtagaatccatcatggtttgatgtggcccgtctgggactgtgatattggcatagcttttttttttttttgtgacgttcatgttttgtcgtgttgattcctttctccgaatcctatcattgtgttcttgcagctgtgtgacatgagtggcgcagttttggatacgtgtgagggggattttcagggtaagctggccccggcctcgcccctccaccccgctagctagccaggccagctgcccgctcctcccctccgctcctcgtctctgcatgtggctcagaccatttgtatggcagcttcactctccagccttccccggcctcagcaaggatgagttgatccatgagcttatttggctttggggcagccctggcctccttttctttcttttcattaggaggagctgggggagaacccagccagccccttttccccaccttctctttcactggaatcacatctgcagctcctccccctccgccctccctcaggcttagaccgtggagctgtaacagatctgttcttcgtgtgagacttttgtgctggagacgcttgtgcccagcaccctgggggacatgcacctgctcacctttgtttaggaaggcgtcctgaggggaggtcataccaggtgcagcccagcacagggtccacaccacagcttggaccccattttctgtggccccgagtttgcaccagcagatctccccttccagacttagatcctaacgtctggcttcctccaggctgagactgctggcaaatcctaaagaatccatatcggagctcatcccgctccccttctccctcatcccaagtggatatggccagacagatcctttctatccaactcaataaaatttgggggagcatttatatcagtatctatttggtctcctcctcctataaagagtaaatcctcaaagcataactgagggaaaggcacgaaggaagccagaaggactttggtgtatttgcctcagtaagtagaggtggccaaagtaaaccaggtcttctccccgatttggcccatggtcctgcagagactaccgaggcgcaccaggatatctggtgctcacagacaggtctcctggcgggtgcttcccgagtgtcctggagacaagcagccactgtgtcccttttcccaggaatgctgatgagggcttctgcccctgaatcccattcccttgcatagtgactcctcccttgggggtgtctttaagggagcagcaaggataaaggtatgacagctcacacaagtgcttgttctgggcctgtctaaattcatcaccgccctgtattattcccatttgactgctgaggcacagggaaggtaggaaacctgtccaaggtcatgctcttcctgcctgacatatttgggatttttgaatctaagcaggggagcttggtgctcttacctgatagcgaaccctgcacagtgaggtgggccccgggccactcagcctcacacctgtgtagagacatgacccaagtagctggggaagggcagaggtggtctgaggccacctgcttcagaggaacaagtggcactggctgttcctccagccccacgccccaaatctctgcttctccatcaggcagcaaaacaaagactggaaggacgtgagggctgcctgggggttggggcaagggaggacctttgttcaagagcttccatgtttgtatgatgtctttcaggacagtgtccaaatgtatgtctgtacacttagtatggtattccccagtctgaacatgtgttcccttcctctgcctcctggagtgctgctcccagccttgcaaagctaagtgacagccagaaactaagcaggcaggccgggcgtggttgctcacgcctgtaatcccaaaactttgggaggctgaagtgggtgaatcacctgaggtcacgagttcgagaccagcctggccaacatggtgaaacccaatctctactaaaaacacc

SEQ ID NO: 87 - DNA, 4627 bp, homo sapiens
tcacttgcctgatatttccagtgtcagagggacacagccaacgtggggtcccttctaggctgacagccgctctccagccactgccgcgagcccgtctgctcccgccctgcccgtgcactctccgcagccgccctccgccaagccccagcgcccgctcccatcgccgatgaccgcggggaggaggatggagatgctctgtgccggcagggtccctgcgctgctgctctgcctgggtttccatcttctacaggcagtcctcagtacaactgtgattccatcatgtatcccaggagagtccagtgataactgcacagctttagttcagacagaagacaatccacgtgtggctcaagtgtcaataacaaagtgtagctctgacatgaatggctattgtttgcatggacagtgcatctatctggtggacatgagtcaaaactactgcaggtgtgaagtgggttatactggtgtccgatgtgaacacttctttttaaccgtccaccaacctttaagcaaagagtatgtggctttgaccgtgattcttattattttgtttcttatcacagtcgtcggttccacatattatttctgcagatggtacagaaatcgaaaaagtaaagaaccaaagaaggaatatgagagagttacctcaggggatccagagttgccgcaagtctgaatggcgccatcaaacttatgggcagggataacagtgtgcctggttaatattaatattccattttattaataatatttatgttgggtcaagtgttaggtcaataacactgtattttaatgtacttgaaaaatgtttttatttttgttttatttttgacagactatttgctaatgtataatgtgcagaaaatatttaatatcaaaagaaaattgatatttttatacaagtaatttcctgagctaaatgcttcattgaaagcttcaaagtttatatgcctggtgcacagtgcttagaagtaagcaattcccaggtcatagctcaagaattgttagcaaatgacagatttctgtaagcctatatatatagtcaaatcgatttagtaagtatgttttttatgttcctcaaatcagtgataattggtttgactgtaccatggtttgatatgtagttggcaccatggtatcatatattaaaacaataatgcaattagaatttgggagaagcaaatataggtcctgtgttaaacactacacatttgaaacaagctaaccctggggagtctatggtctcttcactcaggtctcagctataattctgttatatgaggggcagtggacagttccctatgccaactcacgactcctacaggtactagtcactcatctaccagattctgcctatgtaaaatgaattgaaaaacaattttctgtaatcttttatttaagtagtgggcatttcatagcttcacaatgttccttttttgtatattacaacatttatgtgaggtaattattgctcaacagacaattagaaaaaagtccacacttgaagcctaaatttgtgctttttaagaatatttttagactatttctttttataggggctttgctgaattctaacattaaatcacagcccaaaatttgatggactaattattattttaaaatatatgaagacaataattctacatgttgtcttaagatggaaatacagttatttcatcttttattcaaggaagttttaactttaatacagctcagtaaatggcttcttctagaatgtaaagttatgtatttaaagttgtatcttgacacaggaaatgggaaaaaacttaaaaattaatatggtgtatttttccaaatgaaaaatctcaattgaaagcttttaaaatgtagaaacttaaacacaccttcctgtggaggctgagatgaaaactagggctcattttcctgacatttgtttattttttggaagagacaaagatttcttctgcactctgagcccataggtctcagagagttaataggagtatttttgggctattgcataaggagccactgctgccaccacttttggattttatgggaggctccttcatcgaatgctaaacctttgagtagagtctccctggatcacataccaggtcagggaggatctgttcttcctctacgtttatcctggcatgtgctagggtaaacgaaggcataataagccatggctgacctctggagcaccaggtgccaggacttgtctccatgtgtatccatgcattatataccctggtgcaatcacacgactgtcatctaaagtcctggccctggcccttactattaggaaaataaacagacaaaaacaagtaaatatatatggtcctatacatattgtatatatattcatatacaaacatgtatgtatacatgaccttaatggatcatagaattgcagtcatttggtgctctgctaaccatttatataaaacttaaaaacaagagaaaagaaaaatcaattagatctaaacagttatttctgtttcctatttaatatagctgaagtcaaaatatgtaagaacacattttaaatactctacttacagttggccctctgtggttagttccacatctgtggattcaaccaaccaaggacggaaaatgcttaaaaaataatacaacaacaacaaaaaatacattataacaactatttacttttttttttttctttttgagatggagtctcgctctgttgcccaggttggagtgcagtggcacgatctcggctcactgcaacctcacctcccgggttcaagagatcctcctgcctcagcctcctgagcagctgggactacaggcgcatgccaccatgcccagctaatttttgtatttttagtagaggcggggtttcaccatgttggccaggatggtctcaatctcctaaccttgagatccaccctccacagcctcccaaactgctgggattacaggcgtgagccaccgcacgtagcatttacattaggtattacaagtaatgtaaagatgatttaagtatacaggaggatgtgaataggttatatgcaagcactatgcccttttatataagtgacttgaacatctgtgcccgattttagtatgtgcaggggggcgatctgggaatcagtcccctgtggataccaaggtacaactgtatttattaacgcttactagatgtgaggagagtctgaatattttcagtgatcttggctgtttcaaaaaaatctattgacttttcaataaatcagctgcaatccatttatttcatttacaaaagatttattgtaagcctctcaatcttggtttttcagttgatcttaagcatgtcaattcataaaaacaagtcatttttgtatttttcatctttaagaatgcttaaaaaagctaatccctaaaatagttagatctttgtaaatgcatattaaataataaagtatgacccacattactttttatgggtgaaaataagacaaaaataatagttttagtgaggatggtgctgagtaaacataaaaactgatttgctctcagctgatgtgtcctgtacacagtgggaagattttagttcacacttagtctaactcccccattttacagatttctcactatatatatttctagaaggggctatgcatattcaatgtattgagaaccaaagcaaccacaaatgcataaatgcataatttatggtcttcaaccaaggccacataataacccagttaacttactctttaaccaggaatattaagttctataactagtactcaaggtttaaccttaaaattaagatttccttaaccttaaccttaaaattgatattatattaaacatacataatacaatgtaactccactgttctcctgaatattttttgctctaatctctctgccgaaagtcaaagtgatgggagaattggtatactggtatgactacgtcttaagtcagatttttatttatgagtctttgagactaaattcaatcaccaccaggtatcaaatcaacttttatgcagcaaatatatgattctagtgtctgacttttgttaaattcagtaatgcagtttttaaaaacctgtatctgacccactttgtaatttttgctccaatatccattctgtagacttttgaaaaaaaagtttttaatttgatgcccaatatattctgaccgttaaaaaattcttgttcatatgggagaagggggagtaatgacttgtacaaacagtatttctggtgtatattttaatgtttttaaaaagagtaatttcatttaaatatctgttattcaaatttgatgatgttaaatgtaatataatgtattttctttttattttgcactctgtaattgcactttttaagtttgaagagccattttggtaaacggtttttattaaagatgctatggaacataaagttgtattgcatgcaatttaaagtaacttatttgactatgaatattatcggattactgaattgtatcaatttgtttgtgttcaatatcagctttgataattgtgtaccttaagatattgaaggagaaaatagataatttacaagatattattaatttttatttatttttcttgggaattgaaaaaaattgaaataaataaaaatgcattgaacatcttgcattcaaaatcttcactgac

SEQ ID NO: 88 - DNA, 2725 bp, homo sapiens
gcatgccccatcagccttcagcttgagcccggcggcccccgcccccgccccctgccaccctgcactgccccggctcccccgcggcccccacgctgcagtgcggccgggccccctccccgcaggggccgcccccgccgcccacccctagcgcccgtggtggtggtggtggtggtggtggtggtggcccgggccgcagggccatgaaactacaggccgtgatggagacgctgttgcagcggcagcagcgggcgcgccaggagctggaggcccggcagcagctgccccccgatccccctgctgcaccccccggccgggcccgggctgcccccgacgaggacagagagcccgagagtgcccggatgcagcgggctcagatggccgcactggcagccatgcgggctgcagctgcgggcctgggacacccagccagccccggcggctctgaggatgggcccccaggctcggaggaggaggacgcggcccgggaggggacaccgggctcacccgggcgaggcagagaagggccaggagaggagcactttgaggacatggcctccgacgaggacatgaagcccaaatgggaggaggaggagatggaggaagacctcggggaggatgaggaggaggaggaggaggattacgaggatgaggaggaggaggaggacgaggaggggctgggccccccaggccctgccagcttgggcaccacggcactgttcccccgaaaggcccagccaccccaggccttccgcggcgatggcgttcccagggtgctggggggccaggagcggccggggcctggccctgcccaccccggaggggccgcccacgtagccccgcagctgcagccgcctgaccacggcgactggacttacgaggagcagtttaagcagctctacgaactcgacggggaccccaagaggaaggaattcctggatgacttgttcagcttcatgcagaagcgagggacacctgtgaaccgcatccccatcatggccaaacaggtccttgacctgttcatgctgtacgtgctggtgacggagaagggcggcctcgtggaggtcatcaacaagaagctgtggcgtgagatcaccaagggcctcaacctgcccacgtccatcaccagtgcagccttcaccctgcggacccaatacatgaagtacctgtacccctacgagtgtgagaagcggggcctcagtaaccccaatgagctccaggcagccatagacagcaaccgacgggagggccggcgccagagctttggtggctccctctttgcctactcgccaggcggggcacacggcatgctctcctcacccaagctacccgtgtcctccctgggcctggccgcaagcaccaatggcagctccatcacccccgcccctaagatcaagaaagaggaggactcagccatccccatcacagtccctggccgcctgcctgtgtccctggcgggccaccctgtggtggcagcccaggcagcagctgtgcaagcagcagccgcccaagcagctgtggccgcacaggcagctgccctggaacagctgcgggagaagctggagtctgcagagcctccggagaagaagatggccctggtggccgatgagcagcaacggctgatgcaacgtgcactccagcagaacttcctggccatggcggcccagctgcccatgagcattcggatcaacagccaagcctccgaaagccgccaggactctgctgtgaacctgacgggcaccaacggcagcaacagcatcagcatgtcggtggagatcaacggcatcatgtacacaggagttctgtttgctcagccgccggcccccacgccaacctctgctcccaacaaaggaggcggcggcggcggcggcagcagcagcaacgcaggcggccggggaggaaacaccggaaccagcggcggccaggctgggccagcggggctgtccacaccctccacatctacctcaaataactcgttgccttaaccgcatcactccccacccgccacccaccctggagcccgccggcctgggcagggggtccaggtgggccacacaggggccaggatggcggaagatacgggtggggagggaagatatccagaaaggagccacagctgacgccaaaaagaaaagaaaaaagatatatatatatatatatatatatatacgtatatatataaagaagaatttaataaaacaggggaaaaccaaggaacacttgaatttctcaggttttggacattcagagagatgaattgtgagaacagcaaagaaatccatcagaaaaacagaaagaggcagacgtttcccagggcgttcaggcagccctgatggaccgaaggctctggtgtctggtttggccccacagcagtgtgggccgatcctgtttacctcatacatccctgcactgtgtgttttcatttttgtctgctttagttctcttttattttctattcaccacacactcaccactcccagcttctcgtgtccagtgaaacccctgaaccaagatcactgaatttttgtttttttcttgttgctttgggaaatttttttttctctgtagggtttttaagaggtttcgggggttttgttgtgtaaatattctattttattcttggggggatcaaaccttaggaaaaggatatctatatatctatatagctatatatttgtgttccttcagggaaactggtcttgaaaaagcaagaaaaaaaagcaaaaaa

SEQ ID NO: 89 - DNA, 2228 bp, homo sapiens
atcattcggccctcagactgggctgggcaggtctgagagttagggaaagtccgttcccactgccctcggggagagaagaaaggagggggcaagggagaagctgctggtcggactcacaatgaaaacgctccttcttttgctgctggtgctcctggagctgggagaggcccaaggatcccttcacagggtgcccctcaggaggcatccgtccctcaagaagaagctgcgggcacggagccagctctctgagttctggaaatcccataatttggacatgatccagttcaccgagtcctgctcaatggaccagagtgccaaggaacccctcatcaactacttggatatggaatacttcggcactatctccattggctccccaccacagaacttcactgtcatcttcgacactggctcctccaacctctgggtcccctctgtgtactgcactagcccagcctgcaagacgcacagcaggttccagccttcccagtccagcacatacagccagccaggtcaatctttctccattcagtatggaaccgggagcttgtccgggatcattggagccgaccaagtctctgtggaaggactaaccgtggttggccagcagtttggagaaagtgtcacagagccaggccagacctttgtggatgcagagtttgatggaattctgggcctgggatacccctccttggctgtgggaggagtgactccagtatttgacaacatgatggctcagaacctggtggacttgccgatgttttctgtctacatgagcagtaacccagaaggtggtgcggggagcgagctgatttttggaggctacgaccactcccatttctctgggagcctgaattgggtcccagtcaccaagcaagcttactggcagattgcactggataacatccaggtgggaggcactgttatgttctgctccgagggctgccaggccattgtggacacagggacttccctcatcactggcccttccgacaagattaagcagctgcaaaacgccattggggcagcccccgtggatggagaatatgctgtggagtgtgccaaccttaacgtcatgccggatgtcaccttcaccattaacggagtcccctataccctcagcccaactgcctacaccctactggacttcgtggatggaatgcagttctgcagcagtggctttcaaggacttgacatccaccctccagctgggcccctctggatcctgggggatgtcttcattcgacagttttactcagtctttgaccgtgggaataaccgtgtgggactggccccagcagtcccctaaggaggggccttgtgtctgtgcctgcctgtctgacagaccttgaatatgttaggctggggcattctttacacctacaaaaagttattttccagagaatgtagctgtttccagggttgcaacttgaattaagaccaaacagaacatgagaatacacacacacacacacatatacacacacacacacttcacacatacacaccactcccaccaccgtcatgatggaggaattacgttatacattcatattttgtattgatttttgattatgaaaatcaaaaattttcacatttgattatgaaaatctccaaacatatgcacaagcagagatcatggtataataaatccctttgcaactccactcagccctgacaacccatccacacacggccaggcctgtttatctacactgctgcccactcctctctccagctccacatgctgtacctggatcattctgaagcaaattccgagcattacatcattttgtccataaatatttctaacatccttaaatatacaatcggaattcaagcatctcccattgtcccacaaatgtttggctgtttttgtagttggattgtttgtattaggattcaagcaaggcccatatattgcatttatttgaaatgtctgtaagtctctttccatctacagagtttagcacatttgaacgttgctggttgaaatcccgaggtgtcatttgacatggttctctgaacttatctttcctataaaatggtagttagatctggaggtctgattttgtggcaaaaatacttcctaggtggtgctgggtacttcttgttgcatcctgtcaggaggcagataatgctggtgcctctctattggtaatgttaagactgctgggtgggtttggagttcttggctttaatcattcattacaaagttcagcatttta

SEQ ID NO: 90 - DNA, 1887 bp, homo sapiens
cgcgcagcccctccggccgcgggcgcagcgggggcgctggtggagctgcgaagggccaggtccggcgggcggggcggcggctggcactggctccggactctgcccggccagggcggcggctccagccgggagggcgacgtggagcggccacgtggagcggcccgggggaggctggcggcgggaggcgaggcgcgggcggcgcagcagccaggagcgcccacggagctggacccccagagccgcgcggcgccgcagcagttccaggaaggatgttacctttgacgatgacagtgttaatcctgctgctgctccccacgggtcaggctgccccaaaggatggagtcacaaggccagactctgaagtgcagcatcagctcctgcccaaccccttccagccaggccaggagcagctcggacttctgcagagctacctaaagggactaggaaggacagaagtgcaactggagcatctgagccgggagcaggttctcctctacctctttgccctccatgactatgaccagagtggacagctggatggcctggagctgctgtccatgttgacagctgctctggcccctggagctgccaactctcctaccaccaacccggtgatattgatagtggacaaagtgctcgagacgcaggacctgaatggggatgggctcatgacccctgctgagctcatcaacttcccgggagtagccctcaggcacgtggagcccggagagccccttgctccatctcctcaggagccacaagctgttggaaggcagtccctattagctaaaagcccattaagacaagaaacacaggaagcccctggtcccagagaagaagcaaagggccaggtagaggccagaagggagtctttggatcctgtccaggagcctgggggccaggcagaggctgatggagatgttccagggcccagaggggaagctgagggccaggcagaggctaaaggagatgcccctgggcccagaggggaagctgggggccaggcagaggctgaaggagatgcccccgggcccagaggggaagctgggggccaggcagaggccagggagaatggagaggaggccaaggaacttccaggggaaacactggagtctaagaacacccaaaatgactttgaggtgcacattgttcaagtggagaatgatgagatctagatcttgaagatacaggtaccccacgaagtctcagtgccagaacataagccctgaagtgggcaggggaaatgtacgctgggacaaggaccatctctgtgccccctgtctggtcccagtaggtatcaggtctttctgtgcagctcagggagaccctaagttaaggggcagattaccaataaagaactgaatgaattcatccccccgggccacctctctacccgtccagcctgcccagaccctctcagaggaacggggttggggaccgaaaggacagggatgccgcctgcccagtgtttctgggcctcacggtgctccggcagcagagcgcatggtgctagccatggccggctgcagaggacccagtgaggaaagctcagtctatccctgggccccaaaccctcaccggttccccctcacctggtgttcagacaccccatgctctcctgcagctcagggcaggtgaccccatccccagtaatattaatcatcactagaactttttgagagccttgtacacatcaggcatcatgctgggcattttatatatgattttatcctcacaataattctgtagccaagcagaattggttccatttgacagatgaagaaattgaggcagattgcgttaagtgctgtaccctaaggtgatatgcagctaattaaatggcagatttgaaaaaaaaaaaaaaaaaaaaaaaaaaaaaaaaaaaaa

SEQ ID NO: 91 - DNA, 2381 bp, homo sapiens
cactgaataaactctaggttcccatttctttcagccagatcctcccagggaatcactacaggctggttagccaaaaagtcctgattttctgctcaatagaggtccttactggaaggcagcatgtccaatgttaccttgagaaaaatgtctcccacaggaaatgagatgaagagcaccactcagggaaccacacggaagcagcaggattttcacgaggtgaacaaaagaagaactttcttacaggataacagttggataaagaaacgccctgaagaagaaaaagatgaaaattacggtagggtggtgctcaaccgacataattcccatgatgcattggacaggaaagtaaatgagagagatgtgccaaaagctacaattagtcggtacagttctgatgacactttggacaggatctcagacagaaatgatgctgctaaaacatataaggccaataccttggataaccaactaaccaataggagcatgtccatgtttagatcactggaagtaacaaagttgcaacctggcggttcattgaatgccaacacctccaacaccatagcatccacttctgctactactcctgtaaagaagaagaggcagtcctggtttccaccgccccctccaggttacaatgcctcttcgagcacaggaaccaggagacgggaaccaggtgttcaccctccaatacctccaaagcccagttctcctgtttcttctcctaaccagctgagacaggataataggcagatacatccacctaaaccaggtgtatatacagaaaccaacagatctgctgaaagaaatataagtgaagaattggataatctcatcaaaatgaacaaaagcttgaataggaatcaaggtcttgatagtctcttcagagcaaatccaaaggtagaagaaagagagaaaagagccaaaagccttgaaagtctcatctatatgagtacccggacagataaagatggcaaaggaatccaaagccttggaagtccgattaaagttaatcaaaggactgacaaaaatgagaaaggaagacaaaatctcgaatctgttgctaaagtgaatgccaggatgaataaaacgagcagaagaagtgaagaccttgataatgctactgaagtaaatcccaaaggacatgaaaataccactggaaaaaaagaccttgatgggcttattaaagtggatcctgaaacaaataaaaatattacgaggggccagagccttgataatctcatcaaagtgacccctgaagtaaagagaagtaaccaaggttccaaagaccttaataacttcatcaaagtgtatccaggaacagaaaaaagtactgaagggggccaaagtctcgacagcctcattaaagtgactcctgaaagaaacagaactaaccaagggaaccaagacttggaaaatcttatcaaagtgatcccttcagcaaacaaaagcagtgaacaaggtcttgatgaacatattaatgtcagccccaaagctgtcaaaaacactgatggaaaacaagatcttgataaactcatcaaggtgaatcctgaaattttcacaaacaaccaaagaaaccaagatcttgctaacctcatcaaagtaaatcctgcagtaatcagaaacaatcagagccaagacttggaaaatcttatcaaagtgatcccttcagctcttagaaacactaatcgagaccagaacctggaaaatttaattgaagtaaattctcatgtgtctgaaaacaagaatggaagctctaacactggagccaagcaggcaggaccacaggatactgttgtgtacacaaggacatatgtggagaatagtaaatcacccaaggatggatatcaggagaatatctctggaaaatacatacaaactgtttattcaacttctgataggtctgtcattgaaagagatatgtgcacttactgccgaaaacccttgggtgtagaaactaaaatgattttagatgaattacaaatttgctgccattctacttgctttaagtgtgaaatatgcaagcagcctttggaaaatctacaagcgggtgatagtatttggatttatagacagacaatacactgtgaaccttgctactctaaaattatggcaaagtggattccataactctggcacaaggaaatcaagatgaaaagcactcattaaggaattaaagttacaagttttatcttaataatatgtaatctagaaaagctttcacattgaagatcaactcttgtacaaaattaacaattctgttattgcataagtaatctaattgtcttcaataaggtcacacacataaaaagagccatctggtctctggctagagttagcaataaaaagttcaaatggttccagaaaaaaaaaaaaaaaaaaaa

SEQ ID NO: 92 - DNA, 4249 bp, homo sapiens
gcggcgcgcggggactcggaggtactgggcgcgcgcggctccggctcgggacgcctcgggacgcctcggggtcgggctccggctgcggctgctgctgcggcgcccgcgctccggtgcgctccgcctcctgtgcccgccgcggagcgcagtctgcgcgcccgccgtgcgccctcagctccttttcctgagcccgccgcgatgggagctgcgcggggatccccggccagaccccgccggttgcctctgctcagcgtcctgctgctgccgctgctgggcggtacccagacagccattgtcttcatcaagcagccgtcctcccaggatgcactgcaggggcgccgggcgctgcttcgctgtgaggttgaggctccgggcccggtacatgtgtactggctgctcgatggggcccctgtccaggacacggagcggcgtttcgcccagggcagcagcctgagctttgcagctgtggaccggctgcaggactctggcaccttccagtgtgtggctcgggatgatgtcactggagaagaagcccgcagtgccaacgcctccttcaacatcaaatggattgaggcaggtcctgtggtcctgaagcatccagcctcggaagctgagatccagccacagacccaggtcacacttcgttgccacattgatgggcaccctcggcccacctaccaatggttccgagatgggacccccctttctgatggtcagagcaaccacacagtcagcagcaaggagcggaacctgacgctccggccagctggtcctgagcatagtgggctgtattcctgctgcgcccacagtgcttttggccaggcttgcagcagccagaacttcaccttgagcattgctgatgaaagctttgccagggtggtgctggcaccccaggacgtggtagtagcgaggtatgaggaggccatgttccattgccagttctcagcccagccacccccgagcctgcagtggctctttgaggatgagactcccatcactaaccgcagtcgccccccacacctccgcagagccacagtgtttgccaacgggtctctgctgctgacccaggtccggccacgcaatgcagggatctaccgctgcattggccaggggcagaggggcccacccatcatcctggaagccacacttcacctagcagagattgaagacatgccgctatttgagccacgggtgtttacagctggcagcgaggagcgtgtgacctgccttccccccaagggtctgccagagcccagcgtgtggtgggagcacgcgggagtccggctgcccacccatggcagggtctaccagaagggccacgagctggtgttggccaatattgctgaaagtgatgctggtgtctacacctgccacgcggccaacctggctggtcagcggagacaggatgtcaacatcactgtggccactgtgccctcctggctgaagaagccccaagacagccagctggaggagggcaaacccggctacttggattgcctgacccaggccacaccaaaacctacagttgtctggtacagaaaccagatgctcatctcagaggactcacggttcgaggtcttcaagaatgggaccttgcgcatcaacagcgtggaggtgtatgatgggacatggtaccgttgtatgagcagcaccccagccggcagcatcgaggcgcaagcccgtgtccaagtgctggaaaagctcaagttcacaccaccaccccagccacagcagtgcatggagtttgacaaggaggccacggtgccctgttcagccacaggccgagagaagcccactattaagtgggaacgggcagatgggagcagcctcccagagtgggtgacagacaacgctgggaccctgcattttgcccgggtgactcgagatgacgctggcaactacacttgcattgcctccaacgggccgcagggccagattcgtgcccatgtccagctcactgtggcagtttttatcaccttcaaagtggaaccagagcgtacgactgtgtaccagggccacacagccctactgcagtgcgaggcccagggggaccccaagccgctgattcagtggaaaggcaaggaccgcatcctggaccccaccaagctgggacccaggatgcacatcttccagaatggctccctggtgatccatgacgtggcccctgaggactcaggccgctacacctgcattgcaggcaacagctgcaacatcaagcacacggaggcccccctctatgtcgtggacaagcctgtgccggaggagtcggagggccctggcagccctcccccctacaagatgatccagaccattgggttgtcggtgggtgccgctgtggcctacatcattgccgtgctgggcctcatgttctactgcaagaagcgctgcaaagccaagcggctgcagaagcagcccgagggcgaggagccagagatggaatgcctcaacggtgggcctttgcagaacgggcagccctcagcagagatccaagaagaagtggccttgaccagcttgggctccggccccgcggccaccaacaaacgccacagcacaagtgataagatgcacttcccacggtctagcctgcagcccatcaccacgctggggaagagtgagtttggggaggtgttcctggcaaaggctcagggcttggaggagggagtggcagagaccctggtacttgtgaagagcctgcagagcaaggatgagcagcagcagctggacttccggagggagttggagatgtttgggaagctgaaccacgccaacgtggtgcggctcctggggctgtgccgggaggctgagccccactacatggtgctggaatatgtggatctgggagacctcaagcagttcctgaggatttccaagagcaaggatgaaaaattgaagtcacagcccctcagcaccaagcagaaggtggccctatgcacccaggtagccctgggcatggagcacctgtccaacaaccgctttgtgcataaggacttggctgcgcgtaactgcctggtcagtgcccagagacaagtgaaggtgtctgccctgggcctcagcaaggatgtgtacaacagtgagtactaccacttccgccaggcctgggtgccgctgcgctggatgtcccccgaggccatcctggagggtgacttctctaccaagtctgatgtctgggccttcggtgtgctgatgtgggaagtgtttacacatggagagatgccccatggtgggcaggcagatgatgaagtactggcagatttgcaggctgggaaggctagacttcctcagcccgagggctgcccttccaaactctatcggctgatgcagcgctgctgggccctcagccccaaggaccggccctccttcagtgagattgccagcgccctgggagacagcaccgtggacagcaagccgtgaggagggagcccgctcaggatggcctgggcaggggaggacatctctagagggaagctcacagcatgatgggcaagatccctgtcctcctgggccctgaggcccctgccctagtgcaacaggcattgctgaggtctgagcagggcctggcctttcctcctcttcctcaccctcatcctttgggaggctgacttggacccaaactgggcgactagggctttgagctgggcagttttccctgccacctcttcctctatcagggacagtgtgggtgccacaggtaaccccaatttctggccttcaacttctccccttgaccgggtccaactctgccactcatctgccaactttgcctggggagggctaggcttgggatgagctgggtttgtggggagttccttaatattctcaagttctgggcacacagggttaatgagtctcttggcccactggtcccacttgggggtctagaccaggattatagaggacacagcaagtgagtcctccccactctgggcttgtgcacactgacccagacccacgtcttccccacccttctctcctttcctcatcctaagtgcctggcagatgaaggagttttcaggagcttttgacactatataaaccgccctttttgtatgcaccacgggcggcttttatatgtaattgcagcgtggggtgggtgggcatgggaggtaggggtgggccctggagatgaggagggtgggccatccttaccccacacttttattgttgtcgttttttgtttgttttgtttttttgtttttgtttttgtttttacactcgctgctctcaataaataagccttttttacaacctg

SEQ ID NO: 93 - DNA, 1217 bp, homo sapiens
cccaacctggggcgacttcaggtgtgccacattcgctaagtgctcggagttaatagcacctcctccgagcactcgctcacggcgtccccttgcctggaaagataccgcggtccctccagaggatttgagggacagggtcggagggggctcttccgccagcaccggaggaagaaagaggaggggctggctggtcaccagagggtggggcggaccgcgtgcgctcggcggctgcggagagggggagagcaggcagcgggcggcggggagcagcatggagccggcggcggggagcagcatggagccttcggctgactggctggccacggccgcggcccggggtcgggtagaggaggtgcgggcgctgctggaggcgggggcgctgcccaacgcaccgaatagttacggtcggaggccgatccaggtcatgatgatgggcagcgcccgagtggcggagctgctgctgctccacggcgcggagcccaactgcgccgaccccgccactctcacccgacccgtgcacgacgctgcccgggagggcttcctggacacgctggtggtgctgcaccgggccggggcgcggctggacgtgcgcgatgcctggggccgtctgcccgtggacctggctgaggagctgggccatcgcgatgtcgcacggtacctgcgcgcggctgcggggggcaccagaggcagtaaccatgcccgcatagatgccgcggaaggtccctcagacatccccgattgaaagaaccagagaggctctgagaaacctcgggaaacttagatcatcagtcaccgaaggtcctacagggccacaactgcccccgccacaacccaccccgctttcgtagttttcatttagaaaatagagcttttaaaaatgtcctgccttttaacgtagatatatgccttcccccactaccgtaaatgtccatttatatcattttttatatattcttataaaatgtaaaaaagaaaaacaccgcttctgccttttcactgtgttggagttttctggagtgagcactcacgccctaagcgcacattcatgtgggcatttcttgcgagcctcgcagcctccggaagctgtcgacttcatgacaagcattttgtgaactagggaagctcaggggggttactggcttctcttgagtcacactgctagcaaatggcagaaccaaagctcaaataaaaataaaataattttcattcattcactc

SEQ ID NO: 94 - DNA, 1505 bp, homo sapiens
caaaagcaacccttcttgctccaggcatgtgcaggaggttttttggtttcagcattttgttgcatgctgactatgtcctttaccttctcttaaattatgtatcaattcatgctggtttattcacttcctgatgtctatatgaagaggctgtctgccaacatctttcatcactctgcctgcaactatgaaaaatttagttctaaaaaatgcaaccttgctaaattgagtactaataggattggttcaattatgttctatgtctgttccatattgacattgtgtgcatctttgccatgcaggctttttaggaattatcgcatctctaacttcccacgagtgtttatgaaaatgtttagatttaaagaactttattgctttagacagaataaggcatgcagttctaacagaaagatccatgaattccagaaatatcactgaaaattattgacatttaagattattttctgtttgttactatggttcacaattcaagaataactctggccaggtgcagtagctcacaccctgtaatcccagcactttgggaggctgaggtaggcagatcacttgagctcaagagttcaagaccagcctgggaaacatggcaaactcccaccattacaaaaaaatacaaaaattagttggtcatggtggtgttcacctatagtcccagtgacttgggaggctgggatgggaggatctcttgagcccaggagatgcaggcttgcagtgagccatgatcatgccactgtactgcagactgagtgaaacagcaagatcttgtctgaaaagaaaaaaaaagtaaaagaaaaagaaaagaaaataactcccattgctaaagacatatatgcttatcaggttaagataaagtgaattttgttcttcccaatgacatttcaggatatttgttcacaggaaagaacatgttgggaattggtactggctagaaatttctgttgagtatttattaccccatggtaataatggtaaaccacagtttagaaagattttttttgacagccacagcatgttccgaagagatgattggaagatggaagtggagggttaaataatgaaatgcagctaacatttcggaaagtttctaaaagttgtacaacatgccctacagctactctttaaatctccaaatcaaatgagtttcaggtggagcctctgggaggtgatgaggtcatgagagtggagcctcatgaatgggatgagcactcctacaaaaaggattccagagagctcgcttgctccttccacagtgtgaggacacagagggaaggctctgtctatgaatgagaaagtgggtccccaccagacattgaatctgccgcatcttgatactggacttccagtctccagaactgtgggcaataaatgtctgttgtttattacctgtccagtatctttggtattttgctatagcaacccaaatggactaagaaaacaccagaggccatacctaataaaaatattgacatcacaaaaaaaaaaaaaaa

SEQ ID NO: 95 - DNA, 714 bp, homo sapiens
aacagaacagaaagctctccctcttgtgtgaggcagttgctgtggaaaccccacgggcaggaggcccccggccagcacatcctgtctgcttgtgtctgctgcagagttctgggaccggggccatgtctccacacctcactgctctcctgggcctagtgctctgcctggcccagaccatccacacgcaggagggggcccttcccagaccctccatctcggctgagccaggcactgtgatctccccggggagccatgtgactttcatgtgccggggcccggttggggttcaaacattccgcctggagagggaggatagagccaagtacaaagatagttataatgtgtttcgacttggtccatctgagtcagaggccagattccacattgactcagtaagtgaaggaaatgccgggctttatcgctgcctctattataagccccctggatggtctgagcacagtgacttcctggagctgctggtgaaagaaagctctggaggcccggactccccggacacagagcccggctcctcagctgggactgtgccaggcactgaagcctccggatttgatgcaccatgaatgaggagaaatggcctcccgtcttgtgaacttcaatggggagaaataattagaatgagcaatagaaatgcacagatgcctatacatacatatacaaataaaaagatacgattcgcaaaaaaaaaaaaaaaaa

SEQ ID NO: 96 - DNA, 3511 bp, homo sapiens
ggaagccagacagctggctcgagcctctcctgctcagcaccatggctaagacccctagtgaccatctgctgtccaccctggaggagctggtgccctatgacttcgagaagttcaagttcaagctgcagaacaccagtgtgcagaaggagcactccaggatcccccggagccagatccagagagccaggccggtgaagatggccactctgctggtcacctactatggggaagagtacgccgtgcagctcaccctgcaggtcctgcgggccatcaaccagcgcctgctggccgaggagctccacagggcagccattcaggaatattccacacaagaaaacggcacagatgattccgcagcgtccagctccctgggggagaacaagcccaggagcctgaagactccagaccaccccgaggggaacgaggggaacggccctcggccgtacgggggcggagctgccagcctgcggtgcagccagcccgaggccgggagggggctgtcgaggaagcccctgagcaaacgcagagagaaggcctcggagggcctggacgcgcagggcaagcctcggacccggagcccggccctgccgggcgggagaagccccggcccctgcagggcgctagaggggggccaggccgaggtccggctgcgcagaaacgccagctccgcggggaggctgcaggggctggcggggggcgccccggggcagaaggagtgcaggcccttcgaagtgtacctgccctcgggaaagatgcgacctagaagccttgaggtcaccatttctacaggggagaaggcgcccgcaaatccagaaattctcctgactctagaggaaaagacagctgcgaatctggactcggcaacagaaccccgggcaaggcccactccggatggaggggcatctgcggacctgaaggaaggccctggaaatccagaacattcggtcaccggaaggccaccagacacggctgcgagtccccgctgccacgcccaggaaggagacccagttgacggtacctgtgtgcgtgattcctgcagcttccccgaggcagtttctgggcacccccaggcctcaggcagccgctcacctggctgcccccggtgccaggactcccatgaaaggaagagcccgggaagcctaagcccccagcccctgccacagtgtaagcgccacctgaagcaggtccagctgctcttctgtgaggatcacgatgagcccatctgcctcatctgcagtctgagtcaggagcaccaaggccaccgggtgcgccccattgaggaggtcgccctggaacacaagaagaaaattcagaagcagctggagcatctgaagaagctgagaaaatcaggggaggagcagcgatcctatggggaggagaaggcagtgagctttctgaaacaaactgaagcgctgaagcagcgggtgcagaggaagctggagcaggtgtactacttcctggaacagcaggagcatttctttgtggcctcactggaggacgtgggccagatggttgggcagatcaggaaggcatatgacacccgcgtatcccaggacatcgccctgctcgatgcgctgattggggaactggaggccaaggagtgccagtcagaatgggaacttctgcaggacattggagacatcttgcacagggctaagacagtgcctgtccctgaaaagtggaccactcctcaagagataaaacaaaagatccaactcctccaccagaagtcagagtttgtggagaagagcacaaagtacttctcagaaaccctgcgttcagaaatggaaatgttcaatgttccagagctgattggcgctcaggcacatgctgttaatgtgattctggatgcagaaaccgcttaccccaacctcatcttctctgatgatctgaagagtgttagacttggaaacaagtgggagaggctgcctgatggcccgcaaagatttgacagctgtatcattgttctgggctctccgagtttcctctctggccgccgttactgggaggtggaggttggagacaagacagcatggatcctgggagcctgcaagacatccataagcaggaaagggaacatgactctgtcgccagagaatggctactgggtggtgataatgatgaaggaaaatgagtaccaggcgtccagcgttcccccgacccgcctgctaataaaggagcctcccaagcgtgtgggcatcttcgtggactacagagttggaagcatctccttttacaatgtgacagccagatcccacatctatacattcgccagctgctctttctctgggccccttcaacctatcttcagccctgggacacgtgatggagggaagaacacagctcctctgactatctgtccagtgggtggtcaggggcctgactgaatgcccaacactgcatctctcttcctgcttctggccttgtatcttgcattcacactcaatagtcacggaatgccgactaggtgctagctgctatgggaaatgcaaaaataacaaaatagttactgtgcccacggagcctacccgattatagcagaggtaagttaggaacgaacatgttagtcaatccgggtgaagacatgtactgatgacacaccatggatttcagaggaggaagtacggagtcgttgcataatccgcccctggtgggtggcactctcaggtgctcctgaacagaagatttggccctcattttccctcagaaccccacggcaaggatatatgtccccttgttctctctgcttctgtcttgaggatatgggaagcctagagaaacgcaagcagactggattgggatagaagtatttgtgtacctggattaatgaactatgattttttttttttttttttgagaccaaatcttgctctgtggcccaggctggagtgcagtggcacgatctcagctcactgcaacctccacctcccaggttcaagcgattctcctgcctcagcctcctgagcagctgggattacaggtgcgtgccaccacaccaggctggttttcttgtatttttagtagagacgggggtttcaccatgttagccaggctggtctcgaactcctgacctcaggtgatccacccgcctcagcctcccaaagtgctgggattacaggcatgagccactgtgcccggcctatgattcttttttttttttttttttgagacaaagttttgctcttgtcacccaggctggagtgcagtggtgcaatcttggctcactgcaacctccgcctcccaggttcaagagattctcctgcctcagcctccgaagtagctgggattacaggcgcccgccaccatgcccggctaattttttgcatttttagtagacatgaggtttcatcatgttggccaggccggtctcaaactcctgacctcaggtgatgcacccacctcagcctcccaaagtgcagggattacaggcatgagccaccatgcctggccatgattcttaagagaattgactgggcctcatgaataaaaaaattagaaaatctaaaaaaaa

SEQ ID NO: 97 - DNA, 1616 bp, homo sapiens
cagaacctggagccgttgttcgagcagtacatcaacaacctcaggaggcagctggacagcattgtcggggaacggggccgcctggactcagagctcagaggcatgcaggacctggtggaggacttcaagaacaaatatgaggatgaaatcaacaagcgcacagcagcagagaatgaatttgtgactctgaagaaggatgtggatgctgcctacatgaacaaggttgaactgcaagccaaggcagacactctcacagacgagatcaacttcctgagagccttgtatgatgcagagctgtcccagatgcagacccacatctcagacacatctgtggtgctgtccatggacaacaaccgcaacctggacctggacagcatcatcgctgaggtcaaggcccaatatgaggagattgctcagagaagccgggctgaggctgagtcctggtaccagaccaagtacgaggagctgcaggtcacagcaggcagacatggggacgacctgcgcaacaccaagcaggagattgctgagatcaaccgcatgatccagaggctgagatctgagagcgaccacgtcaagaagcagtgcgccaacctgcaggccgccattgctgatgctgagcagcgtggggagatggccctcaaggatgccaagaacaagctggaagggctggaggatgccctgcagaaggccaagcaggacctggcccggctgctgaaggagtaccaggagctgatgaatgtcaagctggccctggacgtggagatcgccacctaccgcaagctgctggagggtgaggagtgcaggctgaatggcgaaggcgttggacaagtcaacatctctgtggtgcagtccaccgtctccagtggctatggcggtgccagtggtgtcggcagtggcttaggcctgggtggaggaagcagctactcctatggcagtggtcttggcgttggaggtggcttcagttccagcagtggcagagccattgggggtggcctcagctctgttggaggcggcagttccaccatcaagtacaccaccacctcctcctccagcaggaagagctataagcactaaagtgcgtctgctagctctcggtcccacagtcctcaggcccctctctggctgcagagccctctcctcaggttgcctgtcctctcctggcctccagtctcccctgctgtcccaggtagagctggggatgaatgcttagtgccctcacttcttctctctctctctataccatctgagcacccattgctcaccatcagatcaacctctgattttacatcatgatgtaatcaccactggagcttcactgttactaaattattaatttcttgcctccagtgttctatctctgaggctgagcattataagaaaatgacctctgctccttttcattgcagaaaattgccaggggcttatttcagaacaacttccacttactttccactggctctcaaactctctaacttataagtgttgtgaacccccacccaggcagtatccatgaaagcacaagtgactagtcctatgatgtacaaagcctgtatctctgtgatgatttctgtgctcttcactctttgcaattgctaaataaagcagatttataatac

SEQ ID NO: 98 - DNA, 4301 bp, homo sapiens
cagctgctcctccctcctacttcagaggattcacattaattgccctcagagagaacagagagggtgataaggaagaagaccatgctgggaccttccagatcatagacgaagaagaaactcagtttatgagcaattgccctgttgcagtcactgaaagcactccacggaggaggacccggatccaggtgttttggatagcaccaccagcgggaacaggctgcgtgattctgaaggccagcatcgtacaaaaacgcattatttattttcaagatgagggctctctgaccaagaaactttgtgaacaagattccacatttgatggggtgactgacaaacccatcttagactgctgtgcctgcggaactgccaagtacagactcacattttatgggaattggtccgagaagacacacccaaaggattaccctcgtcgggccaaccactggtctgcgatcatcggaggatcccactccaagaattatgtactgtgggaatatggaggatatgccagcgaaggcgtcaaacaagttgcagaattgggctcacccgtgaaaatggaggaagaaattcgacaacagagtgatgaggtcctcaccgtcatcaaagccaaagcccaatggccagcctggcagcctctcaacgtgagagcagcaccttcagctgaattttccgtggacagaacgcgccatttaatgtccttcctgaccatgatgggccctagtcccgactggaacgtaggcttatctgcagaagatctgtgcaccaaggaatgtggctgggtccagaaggtggtgcaagacctgattccctgggacgctggcaccgacagcggggtgacctatgagtcacccaacaaacccaccattccccaggagaaaatccggcccctgaccagcctggaccatcctcagagtcctttctatgacccagagggtgggtccatcactcaagtagccagagttgtcatcgagagaatcgcacggaagggtgaacaatgcaatattgtacctgacaatgtcgatgatattgtagctgacctggctccagaagagaaagatgaagatgacacccctgaaacctgcatctactccaactggtccccatggtccgcctgcagctcctccacctgtgacaaaggcaagaggatgcgacagcgcatgctgaaagcacagctggacctcagcgtcccctgccctgacacccaggacttccagccctgcatgggccctggctgcagtgacgaagacggctccacctgcaccatgtccgagtggatcacctggtcgccctgcagcatctcctgcggcatgggcatgaggtcccgggagaggtatgtgaagcagttcccggaggacggctccgtgtgcacgctgcccactgaggaaacggagaagtgcacggtcaacgaggagtgctctcccagcagctgcctgatgaccgagtggggcgagtgggacgagtgcagcgccacctgcggcatgggcatgaagaagcggcaccgcatgatcaagatgaaccccgcagatggctccatgtgcaaagccgagacatcacaggcagagaagtgcatgatgccagagtgccacaccatcccatgcttgctgtccccatggtccgagtggagtgactgcagcgtgacctgcgggaagggcatgcgaacccgacagcggatgctcaagtctctggcagaacttggagactgcaatgaggatctggagcaggtggagaagtgcatgctccctgaatgccccattgactgtgagctcaccgagtggtcccagtggtcggaatgtaacaagtcatgtgggaaaggccacgtgattcgaacccggatgatccaaatggagcctcagtttggaggtgcaccctgcccagagactgtgcagcgaaaaaagtgccgcatccgaaaatgccttcgaaatccatccatccaaaagctacgctggagggaggcccgagagagccggcggagtgagcagctgaaggaagagtctgaaggggagcagttcccaggttgtaggatgcgcccatggacggcctggtcagaatgcaccaaactgtgcggaggtggaattcaggaacgttacatgactgtaaagaagagattcaaaagctcccagtttaccagctgcaaagacaagaaggagatcagagcatgcaatgttcatccttgttagcaagggtacgagttccccagggctgcactctagattccagagtcaccaatggctggattatttgcttgtttaagacaatttaaattgtgtacgctagttttcatttttgcagtgtggttcgcccagtagtcttgtggatgccagagacatcctttctgaatacttcttgatgggtacaggctgagtggggcgccctcacctccagccagcctcttcctgcagaggagtagtgtcagccaccttgtactaagctgaaacatgtccctctggagcttccacctggccagggaggacggagactttgacctactccacatggagaggcaaccatgtctggaagtgactatgcctgagtcccagggtgcggcaggtaggaaacattcacagatgaagacagcagattccccacattctcatctttggcctgttcaatgaaaccattgtttgcccatctcttcttagtggaactttaggtctcttttcaagtctcctcagtcatcaatagttcctggggaaaaacagagctggtagacttgaagaggagcattgatgttgggtggcttttgttctttcactgagaaattcggaatacatttgtctcacccctgatattggttcctgatgcccccccaacaaaaataaataaataaattatggctgctttatttaaatataaggtagctagtttttacacctgagataaataataagcttagagtgtatttttcccttgcttttgggggttcagaggagtatgtacaattcttctgggaagccagccttctgaactttttggtactaaatccttattggaaccaagacaaaggaagcaaaattggtctctttagagaccaatttgcctaaattttaaaatcttcctacacacatctagacgttcaagtttgcaaatcagtttttagcaagaaaacatttttgctatacaaacattttgctaagtctgcccaaagcccccccaatgcattccttcaacaaaatacaatctctgtactttaaagttattttagtcatgaaattttatatgcagagagaaaaagttaccgagacagaaaacaaatctaagggaaaggaatattatgggattaagctgagcaagcaattctggtggaaagtcaaacctgtcagtgctccacaccagggctgtggtcctcccagacatgcataggaatggccacaggtttacactgccttcccagcaattataagcacaccagattcagggagactgaccaccaagggatagtgtaaaaggacattttctcagttgggtccatcagcagtttttcttcctgcatttattgttgaaaactattgtttcatttcttcttttataggccttattactgcttaatccaaatgtgtaccattggtgagacacatacaatgctctgaatacactacgaatttgtattaaacacatcagaatatttccaaatacaacatagtatagtcctgaatatgtacttttaacacaagagagactattcaataaaaactcactgggtctttcatgtctttaagctaagtaagtgttcagaaggttcttttttatattgtcctccacctccatcattttcaataaaagatagggcttttgctcccttgttcttggagggaccattattacatctctgaactacctttgtatccaacatgttttaaatccttaaatgaattgctttctcccaaaaaaagcacaatataaagaaacacaagatttaattatttttctacttggggggaaaaaagtcctcatgtagaagcacccacttttgcaatgttgttctaagctatctatctaactctcagcccatgataaagttccttaagctggtgattcctaatcaaggacaagccaccctagtgtctcatgtttgtatttggtcccagttgggtacattttaaaatcctgattttggagacttaaaaccaggttaatggctaagaatgggtaacatgactcttgttggattgttattttttgtttgcaatggggaatttataagaagcatcaagtctctttcttaccaaagtcttgttaggtggtttatagttcttttggctaacaaatcattttggaaataaagattttttactacaaaaatg

SEQ ID NO: 99 - DNA, 2076 bp, homo sapiens
agttgttacatgaaatctgcagtttcataatttccgtgggtcgggccgggcgggccaggcgctgggcacggtgatggccaccactggggccctgggcaactactacgtggactcgttcctgctgggcgccgacgccgcggatgagctgagcgttggccgctatgcgccggggaccctgggccagcctccccggcaggcggcgacgctggccgagcaccccgacttcagcccgtgcagcttccagtccaaggcgacggtgtttggcgcctcgtggaacccagtgcacgcggcgggcgccaacgctgtacccgctgcggtgtaccaccaccatcaccaccacccctacgtgcacccccaggcgcccgtggcggcggcggcgccggacggcaggtacatgcgctcctggctggagcccacgcccggtgcgctctccttcgcgggcttgccctccagccggccttatggcattaaacctgaaccgctgtcggccagaaggggtgactgtcccacgcttgacactcacactttgtccctgactgactatgcttgtggttctcctccagttgatagagaaaaacaacccagcgaaggcgccttctctgaaaacaatgctgagaatgagagcggcggagacaagccccccatcgatcccaataacccagcagccaactggcttcatgcgcgctccactcggaaaaagcggtgcccctatacaaaacaccagaccctggaactggagaaagagtttctgttcaacatgtacctcaccagggaccgcaggtacgaggtggctcgactgctcaacctcaccgagaggcaggtcaagatctggttccagaaccgcaggatgaaaatgaagaaaatcaacaaagaccgagcaaaagacgagtgatgccatttgggcttatttagaaaaaagggtaagctagagagaaaaagaaagaactgtccgtcccccttccgccttctcccttttctcacccccaccctagcctccaccatccccgcacaaagcggctctaaacctcaggccacatcttttccaaggcaaaccctgttcaggctggctcgtaggcctgccgctttgatggaggaggtattgtaagctttccattttctataagaaaaaggaaaagttgaggggggggcattagtgctgatagctgtgtgtgttagcttgtatatatatttttaaaaatctacctgttcctgacttaaaacaaaaggaaagaaactacctttttataatgcacaactgttgatggtaggctgtatagtttttagtctgtgtagttaatttaatttgcagtttgtgcggcagattgctctgccaagatacttgaacactgtgttttattgtggtaattatgttttgtgattcaaacttctgtgtactgggtgatgcacccattgtgattgtggaagatagaattcaatttgaactcaggttgtttatgaggggaaaaaaacagttgcatagagtatagctctgtagtggaatatgtcttctgtataactaggctgttaacctatgattgtaaagtagctgtaagaatttcccagtgaaataaaaaaaaattttaagtgttctcggggatgcatagattcatcattttctccaccttaaaaatgcgggcatttaagtctgtccattatctatatagtcctgtcttgtctattgtatatataatctatatgattaaagaaaatatgcataatcagacaagcttgaatattgtttttgcaccagacgaacagtgaggaaattcggagctatacatatgtgcagaaggttactacctagggtttatgcttaattttaattggaggaaatgaatgctgattgtaacggagttaattttattgataataaattatacactatgaaaccgccattgggctactgtagatttgtatccttgatgaatctggggtttccatcagactgaacttacactgtatattttgcaatagttacctcaaggcctactgaccaaattgttgtgttgagatgatatttaactttttgccaaataaaatatattgattcttttctaaaaaaaaaaaaaaaaaaaa

SEQ ID NO: 100 - DNA, 955 bp, homo sapiens
ccaagagctaaaagagagtaagggggaaacaacagcagctccaaccagggcagccttcctgagaagatgcaaccaatcctgcttctgctggccttcctcctgctgcccagggcagatgcaggggagatcatcgggggacatgaggccaagccccactcccgcccctacatggcttatcttatgatctgggatcagaagtctctgaagaggtgcggtggcttcctgatacaagacgacttcgtgctgacagctgctcactgttggggaagctccataaatgtcaccttgggggcccacaatatcaaagaacaggagccgacccagcagtttatccctgtgaaaagacccatcccccatccagcctataatcctaagaacttctccaacgacatcatgctactgcagctggagagaaaggccaagcggaccagagctgtgcagcccctcaggctacctagcaacaaggcccaggtgaagccagggcagacatgcagtgtggccggctgggggcagacggcccccctgggaaaacactcacacacactacaagaggtgaagatgacagtgcaggaagatcgaaagtgcgaatctgacttacgccattattacgacagtaccattgagttgtgcgtgggggacccagagattaaaaagacttcctttaagggggactctggaggccctcttgtgtgtaacaaggtggcccagggcattgtctcctatggacgaaacaatggcatgcctccacgagcctgcaccaaagtctcaagctttgtacactggataaagaaaaccatgaaacgctactaactacaggaagcaaactaagcccccgctgtaatgaaacaccttctctggagccaagtccagatttacactgggagaggtgccagcaactgaataaatacctcttagctgagtggaaaaaaaaaaaaaaaaaaaaaaaaaaaaaaaa

SEQ ID NO: 101 - DNA, 1037 bp, homo sapiens
gccacgtgctgctgggtctcagtcctccacttcccgtgtcctctggaagttgtcaggagcaatgttgcgcttgtacgtgttggtaatgggagtttctgccttcacccttcagcctgcggcacacacaggggctgccagaagctgccggtttcgtgggaggcattacaagcgggagttcaggctggaaggggagcctgtagccctgaggtgcccccaggtgccctactggttgtgggcctctgtcagcccccgcatcaacctgacatggcataaaaatgactctgctaggacggtcccaggagaagaagagacacggatgtgggcccaggacggtgctctgtggcttctgccagccttgcaggaggactctggcacctacgtctgcactactagaaatgcttcttactgtgacaaaatgtccattgagctcagagtttttgagaatacagatgctttcctgccgttcatctcatacccgcaaattttaaccttgtcaacctctggggtattagtatgccctgacctgagtgaattcacccgtgacaaaactgacgtgaagattcaatggtacaaggattctcttcttttggataaagacaatgagaaatttctaagtgtgagggggaccactcacttactcgtacacgatgtggccctggaagatgctggctattaccgctgtgtcctgacatttgcccatgaaggccagcaatacaacatcactaggagtattgagctacgcatcaagaaaaaaaaagaagagaccattcctgtgatcatttcccccctcaagaccatatcagcttctctggggtcaagactgacaatcccgtgtaaggtgtttctgggaaccggcacacccttaaccaccatgctgtggtggacggccaatgacacccacatagagagcgcctacccgggaggccgcgtgaccgaggggccacgccagtaagtgggccagggtcttctgttgagaactctgtgggtttcgctcttccttttggagacagttatcactatgacccacataccacatg

SEQ ID NO: 102 - DNA, 1599 bp, homo sapiens
tctaaagaagcccctgggagcacagctcatcaccatggactggacctggaggttcctctttgtggtggcagcagctacaggtgtccagtcccagatgcaggtggtgcagtctggggctgaagtaaagaagcctgggtcctcggtgacggtctcctgcaaggcatctggaggcaccttcagcaactatgctatcagctgggtgcgacaggcccctggacaagggcttgagtggatgggagggatcatccctctttttggtacaccaacctactcacagaacttccagggcagagtcacgattaccgcggacaaatccaccagcacagcccacatggagctgatcagcctgagatctgaggacacggccgtgtattactgtgcgacagatcgctacaggcaggcaaattttgaccgggcccgggttggctggttcgacccctggggccagggcaccctggtcaccgtctcctcagcctccaccaagggcccatcggtcttccccctggcaccctcctccaagagcacctctgggggcacagcggccctgggctgcctggtcaaggactacttccccgaaccggtgacggtgtcgtggaactcaggcgccctgaccagcggcgtgcacaccttcccggctgtcctacagtcctcaggactctactccctcagcagcgtggtgaccgtgccctccagcagcttgggcacccagacctacatctgcaacgtgaatcacaagcccagcaacaccaaggtggacaagaaagttgagcccaaatcttgtgacaaaactcacacatgcccaccgtgcccagcacctgaactcctggggggaccgtcagtcttcctcttccccccaaaacccaaggacaccctcatgatctcccggacccctgaggtcacatgcgtggtggtggacgtgagccacgaagaccctgaggtcaagttcaactggtacgtggacggcgtggaggtgcataatgccaagacaaagccgcgggaggagcagtacaacagcacgtaccgtgtggtcagcgtcctcaccgtcctgcaccaggactggctgaatggcaaggagtacaagtgcaaggtctccaacaaagccctcccagcccccatcgagaaaaccatctccaaagccaaagggcagccccgagaaccacaggtgtacaccctgcccccatcccgggatgagctgaccaagaaccaggtcagcctgacctgcctggtcaaaggcttctatcccagcgacatcgccgtggagtgggagagcaatgggcagccggagaacaactacaagaccacgcctcccgtgctggactccgacggctccttcttcctctacagcaagctcaccgtggacaagagcaggtggcagcaggggaacgtcttctcatgctccgtgatgcatgaggctctgcacaaccactacacgcagaagagcctctccctgtctccgggtaaatgagtgcgacggccggcaagcccccgctccccgggctctcgcggtcgcacgaggatgcttggcacgtaccccgtgtacatacttcccgggcgcccagcatggaaataaagcacccagcgctgccctgggcccctgcg

SEQ ID NO: 103 - DNA, 5249 bp, homo sapiens
cttccctccccgactgtgcgccgcggctggctcgggttcccgggccgacatgggcgccgccgcgtgggcacggccgctgagcgtgtctttcctgctgctgcttctgccgctcccggggatgcctgcgggctcctgggacccggccggttacctgctctactgcccctgcatggggcgctttgggaaccaggccgatcacttcttgggctctctggcatttgcaaagctgctaaaccgtaccttggctgtccctccttggattgagtaccagcatcacaagcctcctttcaccaacctccatgtgtcctaccagaagtacttcaagctggagcccctccaggcttaccatcgggtcatcagcttggaggatttcatggagaagctggcacccacccactggccccctgagaagcgggtggcatactgctttgaggtggcagcccagcgaagcccagataagaagacgtgccccatgaaggaaggaaacccctttggcccattctgggatcagtttcatgtgagtttcaacaagtcggagctttttacaggcatttccttcagtgcttcctacagagaacaatggagccagagattttctccaaaggaacatccggtgcttgccctgccaggagccccagcccagttccccgtcctagaggaacacaggccactacagaagtacatggtatggtcagacgaaatggtgaagacgggagaggcccagattcatgcccaccttgtccggccctatgtgggcattcatctgcgcattggctctgactggaagaacgcctgtgccatgctgaaggacgggactgcaggctcgcacttcatggcctctccgcagtgtgtgggctacagccgcagcacagcggcccccctcacgatgactatgtgcctgcctgacctgaaggagatccagagggctgtgaagctctgggtgaggtcgctggatgcccagtcggtctacgttgctactgattccgagagttatgtgcctgagctccaacagctcttcaaagggaaggtgaaggtggtgagcctgaagcctgaggtggcccaggtcgacctgtacatcctcggccaagccgaccactttattggcaactgtgtctcctccttcactgcctttgtgaagcgggagcgggacctccaggggaggccgtcttctttcttcggcatggacaggccccctaagctgcgggacgagttctgattctggccggagcaccagaccctctgatcctggagggaccagagtctgagctggtccttccagccaggcctggcagccagaggtgctccgggattgcaaactcctcttctcacctgccaaagatggagaagagtgccagggacccctcaaggagggagacgctccatatcccagggcataggacttgcaggttcctaggagcaggagcatctcccatcgcacgtgctttctgctcttctgggaatttctcacactggcaaagcagtccagcctccgtcttctggtccactctgctctgagcagcctgggatgctgaactcttcagagagatttttttatagagagatttctataattttgatacaaggtcatgactatcctagaactctctgtggtttttgaaaatcattgaattctattaatgtaggtacctaaagtgaccttaactgaatgtggatgaggctggggctggtgtgggtcttttggctgcttttcaaggtgtcccccaatgtggccctcaagagccatccccactgcctggccagagccattgttgtcccctacttcctaggccatttctggggcttgggggatgaatgctgtcctgtgctgtaaacactatgcaaatggaagttatcggttgtggtgctgtgcagcgctctgtgggcgactaagtgccactcacgcagcatgttcctggcaaggagcacataccatcaagccacactatcatggtattgttctcacagtcttttggtggttgatggccactgcaaacctggcaccatcagatctcttctgatctcttgccccagtggggcctggttggtagaatgttggcattcggttgatatccaaagcctgttctcccagccgtcctcctgcagctggagccttcaggccgtattctcacgagggaacgtttgccaaggctctgacctcacagaagatgcccagggcccagaagccatcagaattatcagtggagaagcaccttttgactcttcccttccaatgtaatctctgccaacaccatgaggcttaaggtgctctaagtcatgagtgttttggtctcaaatgctgcagttttaataatctgtgactcctgagagcccatggttttttgaccttgtggttctaaaattccttgtctgacccctgtagatcttttccttgccatgtcacctcccttggcctttgatcctggaaaggtggcagagcctccactgagccaggcccagagctccttgcagtgccttcttccttgtttacctgtgggaggaaacactttttttgtcaggggcagcctggttcagagctcagaggtcacactgtatcaaagatctcaaacagcaaagtcagcatttgctgtatagagctgccacccaactctaagcaggagaaactgtacagaaagggctttgctatttttcccttttgggaaaacaatgaagtgttttaagtcctgggtggactgagagatggtttgcctgtccagacttgctctcaagcctcatccagagaaggagctgcagatgagggagcccgtacactccctgccaccactaggttgtaagcctgtagctggctggctgatttcattttggaattcatttgccatccacagccttacactaggcacacactttagagtctggggctccagtggggcccgcctaattttttttccccccaagacagggccttgctctgtctcccaggctggagtgcagtggcatgatcatggcttactgcagccttgatctcccaggctcaagcgatccttctgcctcagcctctctggtagctgagactgcatgcccagctccaaatcaccttgattcatatcagcagtaataatcacttgtgttctgaaagaaagggcaccagaagttctagcaaaattcagttgtgttctgtgagctagcactttttcctctgacccaattttcttacctataaaatggtgataaaaaccgacaggttgttcaaaggcccagatcagctaaagcatgtatataagagcacgttgtaaacttgaaagagacaaaggcacaaatgtggctgttgattaatttgactgcttctcgttgctcgtcacctccatgccaggcactgtgcttgctaattgctttatgggggcattctcttatttattccccagccctgggaaataggagctgtcattatccttctctttctgcacaaggaaaaattaatgccctgagaattgtcataattttcccaaggctgcccagctggtggtgttaagccagaatttgacctcccagagccagtttccattagctgccatgctctgctgcctctaattcacagaatgcactttctaccctgtgtgccatggagacctcctatggaaaaatgatcagccaccttaccttctactgggtacctgctgtgagtctgcctatgccagaaggattaaggaggggaggttacccaagaaacaaagcctacatgccgcttacagcccccgttggatggttgctcagtacaacagtcttgcattcagcaggtgtttgttcatcacctactatgtgtcaggctctatgctaggtactggggatacaggagagaatcaagcgtaaagtctttgttctcaaggaatttgcattctagaaagtagaagatgtaataaatgtactgtgggacatgttaataagtgctataaagaaatataaagggtttgggagcaaaaagagggagtggatctattttagatgagcccaggtaagacctctctgaagagctgtcatgaaggagggagggagcacattcctggcagagaaaacagcacgtgcaaaggccccgagactggagtgtgttcctgaagagcagccaggaggccagcatggctggagaggcaggcataggcagggaaccgagcagcaggtcagagcaggcgagctgacattctgcagcctggacggccatggcaggaagcttttagttggagagatacaggaagcctcctagggttctgagcagaagaggggcatgagctgattcacattctgaaggacctctctagctggccagtgctgaggaggttggagagagaaagggtgaaagcagagagaccagtgcagggctgttaacagggttgcaggcgagagactggggtgctgggctcccctagactaggactccagtgccctcctctcccaagagacaaaggccattgcattgaaggaggtgggaaatgattagattctgaacatatgtaattatttttcagtctttttcaaagatacaaatatttacatagttttaatcatgtaatatatacaatttaatgtcctagtgttttacttaatagtgtatcatgttttccctgttggtatgtagcctggataaatgctcttaattataaaaaattctgtcgaggagtgttccatagtttattgttttcctattatgagaatttaggccaagtgtggtggctcatgcctgtaatcccagcactttgcgaggccgaggtgggcagatcacttgaggtgaggagttcaagaccagcctggccaacatggtgaattatctctactaaaaatacaaaaaaataataataatagccaggcgtggtggcacatgcctgtattcccagctgcttgggaggctgaggcaggagaatggcttgaacctgggaggtggaggttgcagtgagccgagatggtgccactgcattccagcctgggcaacagagcgagactccatctcaaaaaaaaggagacttcatgtgcccccaatttttcactattgttatttgaaaaaatatttttatttgtaagagtttttctttatttaaaatgttcattaataaagttgttggacgggaagcaaaaaaaaaaagttgtttaagataaattcccagaagtgaatttgttagatcaaacacttaaaactttttgttatggaagaattcaaatataaataaaaaattgtgagtaataaaatgaactcacagtttcaacaatgacccacaaaaaaaaaaaaaaaaaaaaaaaaaaaaaaa

SEQ ID NO: 104 - DNA, 845 bp, homo sapiens
caggtgagcctctcactcgccacctcctcttccacccctgccaggcccagcagccaccacagcgcctgcttcctcggccctgaaatcatgcccctaggtctcctgtggctgggcctagccctgttgggggctctgcatgcccaggcccaggactccacctcagacctgatcccagccccacctctgagcaaggtccctctgcagcagaacttccaggacaaccaattccaggggaagtggtatgtggtaggcctggcagggaatgcaattctcagagaagacaaagacccgcaaaagatgtatgccaccatctatgagctgaaagaagacaagagctacaatgtcacctccgtcctgtttaggaaaaagaagtgtgactactggatcaggacttttgttccaggttgccagcccggcgagttcacgctgggcaacattaagagttaccctggattaacgagttacctcgtccgagtggtgagcaccaactacaaccagcatgctatggtgttcttcaagaaagtttctcaaaacagggagtacttcaagatcaccctctacgggagaaccaaggagctgacttcggaactaaaggagaacttcatccgcttctccaaatctctgggcctccctgaaaaccacatcgtcttccctgtcccaatcgaccagtgtatcgacggctgagtgcacaggtgccgccagctgccgcaccagcccgaacaccattgagggagctgggagaccctccccacagtgccacccatgcagctgctccccaggccaccccgctgatggagccccaccttgtctgctaaataaacatgtgccctcaggccaaaaagaaa

SEQ ID NO: 105 - DNA, 3540 bp, homo sapiens
aagatgcagcggcggctccggttgtcgccgggcgggccaggagcagcgcggacccgagccgggcagggggcgcccgccacggcacccgcgcgctcctagcgccccagacccgcctgcgggcccggatcctccttgccactgtcccacccgccgtccctgcccctccaccctttgtgtcgccgcagcccggtgcccccggctctgcgggaccccggccgggccggaccctggcaaagcgccaggccccgcgtgggctcccggcgagcggttgatggcgagggggcgcggcgcgggctctgtagcccgagttcccgacgctggaggcccggcccgcctcagccgcattgtcccgggccgcgcgcaccggccctgagctgcgccgccgcagcacccgcccgccgcccgcggggccatgcggagagccgccgggatggaggacttctccgcggaggaagaggagtcctggtacgaccagcaggacctggagcaggacttgcacctagctgcggagctggggaagactctgctggagaggaacaaggagctggaggggtccctgcagcagatgtactccaccaatgaggaacaggtgcaggagatcgagtacctaaccaagcagctggacacgctgcggcacgtgaacgagcagcacgccaaagtctatgagcagctggacctgacagcccgggacctggagctgaccaaccacaggctggtgctggagagtaaggctgcccagcagaagatccatgggctgacggagaccattgagcgcctccaggctcaggtggaggagctgcaggcccaggtggagcaactgagaggcctggaacagctgcgagtgctccgggagaagcgggaacgcaggcgtaccatccacaccttcccctgcctcaaggagctgtgcaccagcccccggtgcaaggatgctttccgcctacacagttcctccctggagctgggcccgcggcccctggagcaggagaacgagcggctgcagaccctggtgggggcgctgcgctcccaggtgagccaggagcggcagcgcaaggagcgggcggagcgcgagtacaccgcggtgctgcaggagtactcggagctggagcgccagctgtgcgagatggaggcctgtcgcctgcgtgtgcaggagctggaggccgagctgctggagctgcagcagatgaagcaggccaagacctacctactgggtccggacgaccacctggccgaggccctgctcgcacccctcacgcaggcccctgaggccgacgatccccagcccggccgcggggacgacttgggcgcccaggacggggtctcctcaccggcagcctctccaggccacgtggtgcgcaagagctgcagcgacactgcgctcaacgccatcgtggccaaagacccagccagccggcacgcgggcaacctcacactgcacgccaacagcgtgcgcaagcggggcatgtccatcctgcgggaggtggacgagcagtaccacgcgctgctggagaagtacgaggagctgctgagcaagtgccggcagcacggggccggagtgcggcacgccggcgtgcagacctcgcgccccatctcccgggacagctcgtggagggacctgcgcgggggtgaggagggccagggtgaggtcaaggcaggagagaagagcctgagccagcacgtggaggccgtggacaagcggctggaacagagccagcccgagtacaaggcgctcttcaaagagatcttctccaggatccagaagaccaaggctgacatcaacgccaccaaagtcaagacgcacagcagcaagtgacccttctccggcctgcagcctcccccagggtggaagccgtggggtccctcaggcctgggcggtgcagcttccagagagcgagcgccctttagcggcctgccaccacagcacgcggcctcctgatccggaagcacgcagcatgttccctgctgagcggaggcagcccacctgtcctgcctcccaggagcccttggccacctcgcgccagcccaaaggcgcagctctgagttcaaagccaaatgtccccactaccccagggatcccccagctcccccagcccctggcttcctgaccctgcgcctcaccctcagactggtgaccaggcttctgaaagccattctggatcagttggcttttttttttttttggttaagtttgttttttctaagagatttgcaatgcaaggtctccttgaccccttgccacaactggaaacacttgaaaggggaccccagggccagctgtttcaggggtttcctggaccacccactgcttctccccaaccctgatgcgctgacattcccttagcaccagctgtcccacctccagggtcctgaccaggtcagagatgtcccctgccatgcagagcaggaagcctcagctgggcctggagtgtccctgctccagccctgccagggacaggtttctccctggatactcttggcccaccgcagatctgtagccagtcagaggaggaggagaaggagcccctcagcagagtggtgcagtttcgctcagagcttgtctccttggcttccaaccccagaaatgcctgctgggccttaagctttccaggggccggggcagtggggagcccccatcccttcacaccgccaccaactaaccaagcttggcctctgactcccgtctctgtgcttgcccccatctcagggaccatgatgtctcagtcactccacgctccccacaggccaaccctggcacaggtcatgtctgcagcccccagaatgttctggacatgcaccaccagccggtggtcccaatgtccacccctgcctccccttcactggggactggggttttcgccccatgctgcatcgtgttgtattgggatggggctgaggaacatgctccctccctccctcccataaaatgcctgctcttcacctcccacctttgtggggggcttttgaggacccagctgcgtcaggagttttgcttcaagatgtcagaaagtcaagttcagctaagagacacctaggtccccagcttgccctgagcagcccttcagggcttctggttccttctgccgcccttcctgagaccttagaaaccagaagagccatacagtcagtggaaggcgggggggccctggcctctgcaccgggatcccagtgggaaccttcatgccttatttatttctaatgggtaaaggggttttcttaccaagcatccctgacctcctggagacaccacctgctttccgggcggcactgtgatgggagctggtggcgactgagtccttctgtacgtgcaactgggaaacttttgtcctttgaggctaggcagctccctgccctccgtgtgtgtctgttatctgggggagaggagtgtggaagggttgggggaagagctccagcctgtctgctccccagctctgtagtggcagaccagcgtcacctttgaagtatacgtgagagaaatatatttacaaatgctttattctcttctttaataaaaaatgcaccagtattctaaaaaaaaaaaaaaaa

SEQ ID NO: 106 - DNA, 4999 bp, homo sapiens
gaggaggattcgcagttcaacatcaaggtccctgtgcgttttattgcgacctgccggtgggaactttgtctccgagtcggagcagcatggagcggcggagcgagagcccgtgtctgcgggacagccccgaccggcggagcggcagcccggacgtcaaggggcctcccccagtgaaggtggcccggctggagcagaacggcagccccatgggagcccgcgggaggcccaacggcgccgtggccaaggccgtgggaggtttgatgattcctgtcttttgtgtcgtggagcagttggacggctctcttgaatatgacaacagagaagaacacgccgagtttgtcctggtgcggaaagatgtgctttttagccagctggtggagactgcgctcctggccctggggtattctcacagctctgcggcccaggcccaaggaataatcaagctgggaaggtggaaccctctccccctcagttatgtgacagatgcacccgacgcgacagtggccgacatgctacaagatgtctatcatgttgtgacgttgaaaatccaattacaaagttgttcaaagttggaagacttgcctgcggagcagtggaaccatgccacagtccgcaatgccttaaaggaactgctcaaagagatgaaccagagcacattagccaaagaatgccctctctcccagagtatgatttcatccattgtaaatagcacatattatgccaatgtgtcagcaaccaagtgccaggagtttgggagatggtataaaaagtacaagaagattaaagtggaaagagtggaacgagaaaacctttcagactattgtgttctgggccagcgtccaatgcatttaccaaatatgaaccagctggcatccctggggaaaaccaacgaacagtctcctcacagccaaattcaccacagtactccaatccgaaaccaagtgcccgcattacagcccatcatgagccctggtcttctttctccccagcttagtccacaacttgtaaggcaacaaatagccatggcccatctgataaaccaacagattgccgttagccggctcctggctcaccagcatcctcaagccatcaaccagcagttcctgaaccatccacccatccccagagcagttaagccagagccaaccaactcttccgtggaagtctctccagatatctaccagcaagtcagagatgagctgaagagggccagtgtgtcccaagctgtctttgcaagagtggcattcaaccgcacacagggattgttgtctgagattctgcgtaaggaagaagaccctcggacagcctctcagtctcttctagtaaacctgagggccatgcagaatttcctcaatctgccagaagtggagcgagatcgcatctaccaggatgagagggagcggagcatgaatcccaatgtgagcatggtctcctcggcctccagcagtcccagctcctcccgaacccctcaggccaaaacctcgacaccgacaacagacctccctattaaggtggacggcgccaacatcaacatcacagctgccatttatgacgagatccaacaggagatgaaaagggccaaggtgtctcaagccctgtttgccaaagtggctgcaaataaaagtcagggctggctgtgtgaactgctccgctggaaggagaacccaagcccagaaaaccgcaccctctgggaaaacctctgtaccatccgtcgcttcctgaaccttccccagcatgagagggatgtcatctatgaggaggagtcaaggcatcaccacagcgaacgcatgcaacacgtggtccagcttccccctgagccggtgcaggtacttcatagacagcagtctcagccagccaaggagagttcccctcccagagaagaagcgcctcccccacctcctccgactgaagacagttgtgccaaaaagccccggtctcgcacaaagatctccttagaagccctggggatcctccaaagctttattcatgatgtaggcctgtacccagaccaggaagccatccacactctttcggctcagctggatctccccaaacacaccatcatcaagttcttccagaaccagcggtaccacgtgaagcaccacgggaagctgaaagagcacctgggctccgcggtggacgtggctgaatataaggacgaggagctgctgaccgagtcagaggagaacgacagcgaggaaggctccgaggagatgtacaaagtggaggctgaggaggaaaatgctgacaaaagcaaggcagcacctgccgaaattgaccagagataatgtgaacttctactaggcaaagcaatacatcggtccaaggattttctgctttcatttctttaaaagttttttgttagtttgttttttgtttttgtttttgggtttttttggctttatttttgtctttttatgtctgttttgtttttcttacccttttggacatttctttgttgcacaggatacacctatagactgaataagttcagtatttccgaatcagacatcgccttggcaaagacactaaagcgttacactttatcccgtctctatgactggatcatagtcattataatcacaggagactctgccttcattatccttgcacttaacggaagttacatcaggcaagttccaggatgaaaagaactatgaaataaatgaaggaagctacaagtgtgtgtgtatatgtatatgtatatatctctatatttacatatatatattaaaattgcatgggacagagactttgcaatccgaaagaatagactgtgaaatgagttcttaaagaaaagacttgtttatgtattaaaaaaaccacttcacagtgagtcgctttggctttttgataaactgcggcctgctctcagggtggggtgactatttttgaattcctatttattttttgtgtttgtccctgatttttttttttaattctatggcttcctatctggcagcttaatgggtaatttttgaggtatgtatttaacaaaataaacgacactgccgaaaaaaaaaaaagtgaagtgaaaacaatcagggcacattaaaatgatacaagtcaaataaatcttaaagacacaatgcacacttaaaatgactcaataaaatgacttgctacgttccgttattcaatttgtcattactgtagtgaacagatgcatttctgtggaattccaaataagtaaaactgaaattcagtgcagagaaaactttgtccactagtgcaagtcttgatcaaatgacattttgacattggacatatggaattcatagtatgagccacattttgttgtgaaatttatttacctgcttgtggcttcaaatctgaaaattaataagcctgctcgtttaaaagttgtttgttgttgctgtttttttgtctttttgttttttactagaaaatagttcagtgtaatattaagttagaaaagaagttgctgcccagttaaaggggctccctctcaaataaatctccatccttccctctcccaaaagacatttctgatttctgcttcactttgggcttcctcttcttcgtacacattccatctacctaatcaaacattttcagtccctgatctctcctgtcccttttcctgggatgacagccctaacaagaactgtttttgaatcgttgtgcagctccaggcaatagagtatgtgaagcgatttcagtagaatcacttactcatcctaaaagaaaacattatcccagttacctacatcgcaattaccttatgtaaagcagaactaatgctgactggatgtttaatgggatgagcattaaagctgcaatctactatagtactccagatctctttcggcttcctatgagaaacaccagaagcattactttccacttctacttacagtaattgcaagaggagacctcacattcaggactggcctagtgaacgtaatccatgctttaaactggccattaaacagtcccacatggttggattttttttttttttttgagttgtgctttcacaaaaccttgtcaaagacctcatgcaatatcactttgaaagttattttctgtttactacacaaacattgtaatataactgttaatactatttatatatttgaaaggtataaaaggtaggagttaaaaaaaaaacctctatgtgtagatattaactcagaacttacaatatacagggagaagacatgttgcaatacaagctaattctagctgctcagtaacctctggagtttttaaagggacattttcctgtactttttcaaataatgatgtttaaaaattatcttgacataagcgtcatatacctttgcaaaaggatggttgtttgcagttagccctggccccatccttcctatttctgtagtatgctgcagctttaatcagaaagtccatggttgctgcttcctgatctccgagttactctttccaaattgtcttcttacactgttgctgaaggtcactctgtacacgtaatggaaactgattttgccaagctcttacaaggtggttcatctatcgatggcatccgcatttggtatcttttacacttcaaccaaaaatttattaggtatttttcaatgctaagtcttgccttttattttttaatttcactgccaagtttgcagtggttctaagtgaatctgtgggcattttagcctgtggtcttgccagatctttgcgaattacaatgcatatatgtctatttattcaatatctgtcatataatatctatttggaagaagaaactttctcttgtagtgcctcttgacaaagcacaatttcccgcctttttttttttttttgtgaaatgaaaaaaacaaattgtgttttattgcggtatcaacaatgtgaataaggattaacatattgtaaatgttcttttttccatgtaaatcaactatctttgttatcactaagtgataattaatttttaacttatgtgcattgttaggctgttagaattttttggttgttaaaataaacgcattcaataaatatg

SEQ ID NO: 107 - DNA, 2880 bp, homo sapiens
tgctgctctccgcccgcgtccggctcgtggccccctacttcgggcaccatggacacctcccggctcggtgtgctcctgtccttgcctgtgctgctgcagctggcgaccgggggcagctctcccaggtctggtgtgttgctgaggggctgccccacacactgtcattgcgagcccgacggcaggatgttgctcagggtggactgctccgacctggggctctcggagctgccttccaacctcagcgtcttcacctcctacctagacctcagtatgaacaacatcagtcagctgctcccgaatcccctgcccagtctccgcttcctggaggagttacgtcttgcgggaaacgctctgacatacattcccaagggagcattcactggcctttacagtcttaaagttcttatgctgcagaataatcagctaagacacgtacccacagaagctctgcagaatttgcgaagccttcaatccctgcgtctggatgctaaccacatcagctatgtgcccccaagctgtttcagtggcctgcattccctgaggcacctgtggctggatgacaatgcgttaacagaaatccccgtccaggcttttagaagtttatcggcattgcaagccatgaccttggccctgaacaaaatacaccacataccagactatgcctttggaaacctctccagcttggtagttctacatctccataacaatagaatccactccctgggaaagaaatgctttgatgggctccacagcctagagactttagatttaaattacaataaccttgatgaattccccactgcaattaggacactctccaaccttaaagaactaggatttcatagcaacaatatcaggtcgatacctgagaaagcatttgtaggcaacccttctcttattacaatacatttctatgacaatcccatccaatttgttgggagatctgcttttcaacatttacctgaactaagaacactgactctgaatggtgcctcacaaataactgaatttcctgatttaactggaactgcaaacctggagagtctgactttaactggagcacagatctcatctcttcctcaaaccgtctgcaatcagttacctaatctccaagtgctagatctgtcttacaacctattagaagatttacccagtttttcagtctgccaaaagcttcagaaaattgacctaagacataatgaaatctacgaaattaaagttgacactttccagcagttgcttagcctccgatcgctgaatttggcttggaacaaaattgctattattcaccccaatgcattttccactttgccatccctaataaagctggacctatcgtccaacctcctgtcgtcttttcctataactgggttacatggtttaactcacttaaaattaacaggaaatcatgccttacagagcttgatatcatctgaaaactttccagaactcaaggttatagaaatgccttatgcttaccagtgctgtgcatttggagtgtgtgagaatgcctataagatttctaatcaatggaataaaggtgacaacagcagtatggacgaccttcataagaaagatgctggaatgtttcaggctcaagatgaacgtgaccttgaagatttcctgcttgactttgaggaagacctgaaagcccttcattcagtgcagtgttcaccttccccaggccccttcaaaccctgtgaacacctgcttgatggctggctgatcagaattggagtgtggaccatagcagttctggcacttacttgtaatgctttggtgacttcaacagttttcagatcccctctgtacatttcccccattaaactgttaattggggtcatcgcagcagtgaacatgctcacgggagtctccagtgccgtgctggctggtgtggatgcgttcacttttggcagctttgcacgacatggtgcctggtgggagaatggggttggttgccatgtcattggttttttgtccatttttgcttcagaatcatctgttttcctgcttactctggcagccctggagcgtgggttctctgtgaaatattctgcaaaatttgaaacgaaagctccattttctagcctgaaagtaatcattttgctctgtgccctgctggccttgaccatggccgcagttcccctgctgggtggcagcaagtatggcgcctcccctctctgcctgcctttgccttttggggagcccagcaccatgggctacatggtcgctctcatcttgctcaattccctttgcttcctcatgatgaccattgcctacaccaagctctactgcaatttggacaagggagacctggagaatatttgggactgctctatggtaaaacacattgccctgttgctcttcaccaactgcatcctaaactgccctgtggctttcttgtccttctcctctttaataaaccttacatttatcagtcctgaagtaattaagtttatccttctggtggtagtcccacttcctgcatgtctcaatccccttctctacatcttgttcaatcctcactttaaggaggatctggtgagcctgagaaagcaaacctacgtctggacaagatcaaaacacccaagcttgatgtcaattaactctgatgatgtcgaaaaacagtcctgtgactcaactcaagccttggtaacctttaccagctccagcatcacttatgacctgcctcccagttccgtgccatcaccagcttatccagtgactgagagctgccatctttcctctgtggcatttgtcccatgtctctaattaatatgtgaaggaaaatgttttcaaaggttgagaacctgaaaatgtgagattgagtatatcagagcagtaattaataagaagagctgaggtgaaactcggtttaaa

SEQ ID NO: 108 - DNA, 4755 bp, homo sapiens
gctgctctcgttcgcttggctcagctcagctcagctcagcgcagctccgcggccgccaagccgaggcgggcacggtctccgagtcgcggacgccagctccgagctccctctctccgccgcgcctccgccaggtcgcgccttcgtcgggaccacttcgggcaggagtcgcgtggcgaaggcctgcggccgcggcacaaagttgggggccgcgaagatgaggctgtccccggcgcccctgaagctgagccggactccggcactgctggccctggcgctgcccctggccgcggcgctggccttctccgacgagaccctggacaaagtgcccaagtcagagggctactgcagccgtatcctgcgcgcccagggcacgcggcgcgagggctacaccgagttcagcctccgcgtggagggcgaccccgacttctacaagccgggaaccagctaccgcgtaacactttcagctgctcctccctcctacttcagaggattcacattaattgccctcagagagaacagagagggtgataaggaagaagaccatgctgggaccttccagatcatagacgaagaagaaactcagtttatgagcaattgccctgttgcagtcactgaaagcactccacggaggaggacccggatccaggtgttttggatagcaccaccagcgggaacaggctgcgtgattctgaaggccagcatcgtacaaaaacgcattatttattttcaagatgagggctctctgaccaagaaactttgtgaacaagattccacatttgatggggtgactgacaaacccatcttagactgctgtgcctgcggaactgccaagtacagactcacattttatgggaattggtccgagaagacacacccaaaggattaccctcgtcgggccaaccactggtctgcgatcatcggaggatcccactccaagaattatgtactgtgggaatatggaggatatgccagcgaaggcgtcaaacaagttgcagaattgggctcacccgtgaaaatggaggaagaaattcgacaacagagtgatgaggtcctcaccgtcatcaaagccaaagcccagtggccagcctggcagcctctcaacgtgagagcagcaccttcagctgaattttccgtggacagaacgcgccatttaatgtccttcctgaccatgatgggccctagtcccgactggaacgtaggcttatctgcagaagatctgtgcaccaaggaatgtggctgggtccagaaggtggtgcaagacctgattccctgggacgctggcaccgacagcggggtgacctatgagtcacccaacaaacccaccattccccaggagaaaatccggcccctgaccagcctggaccatcctcagagtcctttctatgacccagagggtgggtccatcactcaagtagccagagttgtcatcgagagaatcgcacggaagggtgaacaatgcaatattgtacctgacaatgtcgatgatattgtagctgacctggctccagaagagaaagatgaagatgacacccctgaaacctgcatctactccaactggtccccatggtccgcctgcagctcctccacctgtgacaaaggcaagaggatgcgacagcgcatgctgaaagcacagctggacctcagcgtcccctgccctgacacccaggacttccagccctgcatgggccctggctgcagtgacgaagacggccccacctgcaccatgtccgagtggatcacctggtcgccctgcagcatctcctgcggcatgggcatgaggtcccgggagaggtatgtgaagcagttcccggaggacggctccgtgtgcacgctgcccactgaggaaacggagaagtgcacggtcaacgaggagtgctctcccagcagctgcctgatgaccgagtggggcgagtgggacgagtacagcgccacctgcggcatgggcatgaagaagcggcaccgcatgatcaagatgaaccccgcagatggctccatgtgcaaagccgagacatcacaggcagagaagcgcatgatgccagagtgccacaccatcccatgcttgctgtccccatggtccgagtggagtgactgcagcgtgacctgcgggaagggcatgcgaacccgacagcggatgctcaagtctctggcagaacttggagactgcaatgaggatctggagcaggtggagaagtgcatgctccctgaatgccccattgactgtgagctcaccgagtggtcccagtggtcggaatgtaacaagtcatgtgggaaaggccacgtgattcgaacccggatgatccaaatggagcctcagtttggaggtgcaccctgcccagagactgtgcagcgaaaaaagtgccgcatccgaaaatgccttcgaaatccatccatccaaaagctacgctggagggaggcccgagagagccggcggagtgagcagctgaaggaagagtctgaaggggagcagttcccaggttgtaggatgcgcccatggacggcctggtcagaatgcaccaaactgtgcggaggtggaattcaggaacgttacatgactgtaaagaagagattcaaaagctcccagtttaccagctgcaaagacaagaaggagatcagagcatgcaatgttcatccttgttagcaagggtacgagttccccagggctgcactctagattccagagtcaccaatggctggattatttgcttgtttaagacaatttaaattgtgtacgctagttttcatttttgcagtgtggttcgcccagtagtcttgtggatgccagagacatcctttctgaatacttcttgatgggtacaggctgagtggggcgccctcacctccagccagcctcttcctgcagaggagtagtgtcagccaccttgtactaagctgaaacatgtccctctggagcttccacctggccagggaggacggagactttgacctactccacatggagaggcaaccatgtctggaagtgactatgcctgagtcccagggtgcggcaggtaggaaacattcacagatgaagacagcagattccccacattctcatctttggcctgttcaatgaaaccattgtttgcccatctcttcttagtggaactttaggtctcttttcaagtctcctcagtcatcaatagttcctggggaaaaacagagctggtagacttgaagaggagcattgatgttgggtggcttttgttctttcactgagaaattcggaatacatttgtctcacccctgatattggttcctgatgcccccccaacaaaaataaataaataaattatggctgctttatttaaatataaggtagctagtttttacacctgagataaataataagcttagagtgtatttttcccttgcttttgggggttcagaggagtatgtacaattcttctgggaagccagccttctgaactttttggtactaaatccttattggaaccaagacaaaggaagcaaaattggtctctttagagaccaatttgcctaaattttaaaatcttcctacacacatctagacgttcaagtttgcaaatcagtttttagcaagaaaacatttttgctatacaaacattttgctaagtctgcccaaagcccccccaatgcattccttcaacaaaatacaatctctgtactttaaagttattttagtcatgaaattttatatgcagagagaaaaagttaccgagacagaaaacaaatctaagggaaaggaatattatgggattaagctgagcaagcaattctggtggaaagtcaaacctgtcagtgctccacaccagggctgtggtcctcccagacatgcataggaatggccacaggtttacactgccttcccagcaattataagcacaccagattcagggagactgaccaccaagggatagtgtaaaaggacattttctcagttgggtccatcagcagtttttcttcctgcatttattgttgaaaactattgtttcatttcttcttttataggccttattactgcttaatccaaatgtgtaccattggtgagacacatacaatgctctgaatacactacgaatttgtattaaacacatcagaatatttccaaatacaacatagtatagtcctgaatatgtacttttaacacaagagagactattcaataaaaactcactgggtctttcatgtctttaagctaagtaagtgttcagaaggttcttttttatattgtcctccacctccatcattttcaataaaagatagggcttttgctcccttgttcttggagggaccattattacatctctgaactacctttgtatccaacatgttttaaatccttaaatgaattgctttctcccaaaaaaagcacagtataaagaaacacaagatttaattatttttctacttggggggaaaaaagtcctcatgtagaagcacccacttttgcaatgttgttctaagctatctatctaactctcagcccatgataaagttccttaagctggtgattcctaatcaaggacaagccaccctagtgtctcatgtttgtatttggtcccagttgggtacattttaaaatcctgattttggagacttaaaaccaggttaatggctaagaatgggtaacatgactcttgttggattgttattttttgtttgcaatggggaatttataagaagcatcaagtctctttcttaccaaagtcttgttaggtggtttatagttcttttggctaacaaatcattttggaaataaagattttttactac

SEQ ID NO: 109 - DNA, 803 bp, homo sapiens
gcctcagccatggcctggaccgttctcctcctcggcctcctctctcactgcacaggctctgtgacctcctatgtgctgactcagccaccctcggtgtcagtggccccaggaaaggcggccaggattacctgtgggggaatcaacattgcaagtaaaagtgtgcactggtaccagcagaagccaggccaggcccctgtgctggtcgtctatggtgatagcgaccggccctcagggatccctgagcgattctctggctccaactctgggaacacggccaccctgaacatcagtagggtcgaagccggggatgaggccgcctattactgtcaggtgtgggatagtagtagtgatcatgtggtattcggcggagggaccaagctgaccgtcctaggtcagcccaaggctgccccctcggtcactctgttcccgccctcctctgaggagcttcaagccaacaaggccacactggtgtgtctcataagtgacttctacccgggagccgtgacagtggcctggaaggcagatagcagccccgtcaaggcgggagtggagaccaccacaccctccaaacaaagcaacaacaagtacgcggccagcagctatctgagcctgacgcctgagcagtggaagtcccacagaagctacagctgccaggtcacgcatgaagggagcaccgtggagaagacagtggcccctacagaatgttcataggttctcaaccctcaccccccaccacgggagactagagctgcaggatcccgggggaggggtctctcctcccaccccaagcatcaagcccttct

SEQ ID NO: 110 - DNA, 3431 bp, homo sapiens
caccctatcctacactactaggaacttgcacagtccgcctcgggcagcccaaagctcctctgcccaccctggctcccaaaaccctccaaaacaaaagaccagaaaagcactctccacccagcagccaaacgcctccttcttgacgccagcccccaccctctgtctgctcgagcccaggaaaggcctgaaggaacaggccggggaaggagccctccctctctcccttgtccctccatccacccagcgccggcatctggagaccctatggcccgggctcactggggctgctgcccctggctggtcctcctctgtgcttgtgcctggggccacacaaagccactggaccttggagggcaggatgtgagaaattgttccaccaaccccccttaccttccagttactgtggtcaataccacaatgtcactcacagccctccgccagcagatgcagacccagaatctctcagcctacatcatcccaggcacagatgctcacatgaacgagtacatcggccaacatgacgagaggcgtgcgtggattacaggctttacagggtctgcaggaactgcagtggtgactatgaagaaagcagctgtctggaccgacagtcgctactggactcaggctgagcggcaaatggactgtaattgggagctccataaggaagttggcaccactcctattgtcacctggctcctcaccgagattcccgctggagggcgtgtgggttttgaccccttcctcttgtccattgacacctgggagagttatgatctggccctccaaggctctaacagacagctggtgtccatcacaaccaatcttgtggacctggtatggggatcagagaggccaccggttccaaatcaacccatttatgccctgcaggaggcattcacagggagcacttggcaggagaaagtatctggcgtccgaagccagatgcagaagcatcaaaaggtcccgactgccgtccttctgtcggcgcttgaggagacggcctggctcttcaaccttcgagccagtgacatcccctataaccccttcttctattcctacacgctgctcacagactcttctattaggttgtttgcaaacaagagtcgctttagctccgaaaccttgagctatctgaactccagttgcacaggccccatgtgtgtgcaaatcgaggattacagccaagttcgtgacagcatccaggcctactcattgggagatgtgaggatctggattgggaccagctataccatgtatgggatctatgaaatgataccaagggagaaactcgtgacagacacctactccccagtgatgatgaccaaggcagtgaagaacagcaaggagcaggccctcctcaaggccagccacgtgcgggacgctgtggctgtgatccggtacttggtctggctggagaagaacgtgcccaaaggcacagtggatgagttttcgggggcagagatcgtggacaagttccgaggagaagaacagttctcctccggacccagttttgaaaccatctctgctagtggtttgaatgctgccctggcccactacagcccgaccaaggagctgaaccgcaagctgtcctcagatgagatgtacctgctggactctggggggcagtactgggacgggaccacagacatcaccagaacagtccactggggcaccccctctgcctttcagaaggaggcatatacccgtgtgctgataggaaatattgacctgtccaggctcatctttcccgctgctacatcagggcgaatggtggaggcctttgcccgcagagccttgtgggatgctggtctcaattatggtcatgggacaggccacggcattggcaacttcctgtgtgtgcatgagtggccagtgggattccagtccaacaacatcgctatggccaagggcatgttcacttccattgaacctggttactataaggatggagaatttgggatccgtctcgaagatgtggctctcgtggtagaagcaaagaccaagtacccagggagctacctgacctttgaagtggtatcatttgtgccctatgaccggaacctcatcgatgtcagcctgctgtctcccgagcatctccagtacctgaatcgctactaccagaccatccgggagaaggtgggtccagagctgcagaggcgccagctactagaggagttcgagtggcttcaacagcacacagagcccctggccgccagggccccagacaccgcctcctgggcctctgtgttagtggtctccacccttgccatccttggctggagtgtctagaggctccagactctcctgttaaccctccatctagatggggggctcccttgcttagctcccctcaccctgcactgaacataccccaagagcccctgctggcccattgcctagaaacctttgcattcatcctccttctccaagacctatggagaaggtcccaggccccaggaaacacagggcttcttggccccagatggcacctccctgcaccccggggttgtataccacaccctgggcccctaatcccaggccccgaaataggaaagccagctagtctcttctcttctgtgatctcagtaggcctaacctataacctaacacagactgctacagctgctcccctcccgccaaacaaagccccaagaaaacaatgcccctaccacccaagggtgccatggtcccgggaaaacccaacctgtcaccgcgtgttgggcgtaaccagaactgttcccccccaccagggcttaaaaatcgcccccactttttaaccatcgtccattaaccacctggtgggcatagccagagctgttcgaacccagccagggatgaaaaatcaacccccgacatggaacccatgattcctaaacccggggtaggttccatgccaagtaacagcagagggagttaagccataggaatttggctgtggagtaagagggaatgcggtgaggcagtgtggaatatgaccctaccagaggttggagaacaaacttgggcagccggaacccgtcactattttagattcctggcattcgaggagccctttgaactttccaaagtgcagccacagctacaatgctgttaaatcctcccacatttcttggatgccccttcaccttgtgtggacagtgtctggtttccccattttacagacaggaaaactgagcttcagacagggggtgggctttgcctaaggacacacaaatttggttgggagttgatggggccagatgagccagcattccagctgtttcacccttcagcaacatgcagagtccctgagcccacctcccagccctctcctcattctctgaacccactgtggtgagaagaatttgctccggccaaattggccgttagccacctgggtccacatcctgctaagacgtttaaaacagcctaacaaagacacttgcctgtgg

SEQ ID NO: 111 - DNA, 4491 bp, homo sapiens; identical to SEQ ID NO: 75

SEQ ID NO: 112 - DNA, 1499 bp, homo sapiens
cttcctgtctctccactttctttccctctccgttttggtgggctggttgaagatgaaatccactgaggagggaagtccagcaccctgtgtgccagtccagaactggcccatctgtagaccccctgaaaatcatatgggcttggatttggatattctcaacagaaagggttaaaggctgatggtacctaaagcctggtacttgaattttgatcaagataagctgccttaagttctcttcattacacaaatgatcctagataattgatagatcctgtggttcaactggatttctagatagaagctggattcatgtgatgccagaggagtaaaatttcaagagactgaaaccagatctgagtttcgctgttccagtctggacctctttggtgctgtaaatcctggatatactgtagatgagtactgcgtttttcttttatgctctcttcagcttctggagacctcactatcctattatgtctttgtgtgaagacatgctgctttgtaattatcgaaagtgtcgcatcaaactctctggctatgcatgggtcactgcctgctctcacatcttctgtgatcagcatggcagtggtgagtttagtcgctcaccagctatctgtcctgcctgcaacagtaccctttctggaaagctagatattgtccgcacagaactcagtccatcagaggaatataaagctatggtattggcaggactgcgaccagagatcgtgttggacattagctcccgagcgctggccttctggacatatcaggtacatcaggaacgtctctatcaagaatacaatttcagcaaggctgagggccatctgaaacagatggagaagatatatactcagcaaatacaaagcaaggatgtagaattgacctctatgaaaggggaggttacctccatgaagaaagtactagaagaatacaagaaaaagttcagtgacatctctgagaaacttatggagcgcaatcgtcagtatcaaaagctccaaggcctctatgatagccttaggctacgaaacatcactattgctaaccatgaaggcacccttgaaccatccatgattgcacagtctggtgttcttggcttcccattaggtaacaactccaagtttcctttggataatacacctgttcgaaatcggggcgatggagatggagattttcagttcagaccattttttgcgggttctcccacagcacctgaacccagcaacagcttttttagttttgtctctccaagtcgtgaattagagcagcagcaagtttctagcagggccttcaaagtaaaaagaatttgagccacgcatagtgtcacgcacctgtgatcccagctacttaggaggttgaggctgggaggatcacttgagcccaggagtctgaggctttagtgatctaagatcatgccactgcactccagcctgggcaacagagtgagaccctgtttctaaaaaaaaataaagataatttagctaactttacaaaaaaaaaaa

SEQ ID NO: 113 - DNA, 1932 bp, homo sapiens
aagcttggcacgaggccgccattgacacgcacagatagaacccaaagaaaggcaaagagtcctgcccggcaccggcgccgcgtgggccaaacctgcgcccgtggaggggcgcgcagagggcaccgggcgccgggagcaggcggcgcagcaccagcattgtgttagtgccgggaggccactgtgtcagcaagctgagagggaaactgaagcaagatgtcgggccggagtgggaagaagaaaatgtccaagctgtcccgttcagctagggcaggtgtcatctttccagtggggaggctgatgcgttatctgaagaaagggacgttcaagtaccggatcagcgtgggcgcccctgtctacatggcggcagtcattgagtacctggcagcggaaattctagaattggccggcaatgccgcgagggacaacaagaaggcccggatagccccgagacacatcttgctggcagttgccaatgacgaggagctcaaccagctgctaaaaggagtgaccatcgccagtggaggcgtcctgcccagaattcaccccgaactgctggccaaaaagcgagggaccaaaggcaagtcggaaacgatcctctccccacccccagagaaaagaggcaggaaggccacgtcaggcaagaagggggggaagaaatccaaggctgccaaaccacggacgtccaaaaagtccaaaccaaaggacagcgataaagaaggaacttcaaattccacctctgaagatgggccaggggatggattcaccattctgtcttctaagagccttgttctgggacagaagctgtccttaacccagagtgacatcagccatattggctccatgagagtggagggcattgtccacccaaccacagccgaaattgacctcaaagaagatataggtaaagccttggaaaaggctgggggaaaagagttcttggaaacggtaaaggagcttcgcaaatcccaaggccctttggaagtcgccgaagccgccgtcagccaatccagtggactcgcagccaaatttgtcatccactgtcacatccctcagtggggctccgacaaatgtgaagaacagcttgaagagaccatcaaaaactgcctgtcagcggcggaggacaagaagctaaagtccgtcgcgttcccgcctttccccagcggcagaaactgctttcccaaacagactgcggcccaggtgaccctcaaagccatctcagcccactttgatgactcgagcgcgtcctcgctgaagaacgtgtacttcctgctcttcgacagcgagagcatcggcatctacgtgcaggagatggccaagctcgacgccaagtagccgccgcactttccagcagggatcggaggacgacccgagtcccaagagtggggttttgctttttaaaaggagagaggaggggtgatggcaggggagtggagggtggccgggcaggtcctgccggcgcagggagccctctgcccttcacactctcctccaaaagagcctccatctgtaaggaagcaggtctccgcgaggggtttctttccatgtgttttcctcctgttgttaaaagaacttttttaaaaaaacagacctcgttttagatttatagcattgacttttacacacattcacacaagaaaaaaatcctttcaaaattcttaaatcttctgttcctcctttttccaagggaagagggcaaaaagtggcctgggctctgttggtgtgcgtgttccgtggcggagagaagaaaatgggaaagacatctcactggtgcttttctcttttgttttagtgccccccgcccccatccctataatatctgtaactactcctaaaaaggttttgattcaggcttttttttggtttcattttgtttttttaagaaaaagaaaatgaaaggaaaaaaaaaaaaaaaaaaaaaattcctgcggccgc

SEQ ID NO: 114 - DNA, 1968 bp, homo sapiens
cgcagggccacagcagctcagccgccggtgccccctcggaaaccatgacccccggcgcgggcccatggagccatggcctatagggtcctgggccgcgcggggccacctcagccgcggagggcgcgcaggctgctcttcgccttcacgctctcgctctcctgcacttacctgtgttacagcttcctgtgctgctgcgacgacctgggtcggagccgcctcctcggcgcgcctcgctgcctccgcggccccagcgcgggcggccagaaacttctccagaagtcccgcccctgtgatccctccgggccgacgcccagcgagcccagcgctcccagcgcgcccgccgccgccgtgcccgcccctcgcctctccggttccaaccactccggctcacccaagctgggtaccaagcggttgccccaagccctcattgtgggcgtgaagaaggggggcacccgggccgtgctggagtttatccgagtacacccggacgtgcgggccttgggcacggaaccccacttctttgacaggaactacggccgcgggctggattggtacaggagcctgatgcccaggaccctcgagagccagatcacgctggagaagacgcccagctactttgtcactcaagaggctcctcgacgcatcttcaacatgtcccgagacaccaagctgatcgtggttgtgcggaaccctgtgacccgtgccatctctgattacacgcagacactctccaagaagcccgacatcccgacctttgagggcctctccttccgcaaccgcaccctgggcctggtggacgtgtcatggaacgccatccgcatcggcatgtacgtgctgcacctggagagctggctgcagtacttcccgctagctcagattcacttcgtcagtggcgagcgactcatcactgacccggccggcgagatggggcgagtccaggacttcctgggcattaagagattcatcacggacaagcacttctatttcaacaagaccaaaggattcccttgcttgaaaaaaacagaatcgagcctcctgcctcgatgcttgggcaaatcaaaagggagaactcatgtacagattgatcctgaagtgatagaccagctccgagaattttatagaccgtataatatcaaattttatgaaaccgttgggcaggacttcaggtgggaataagcccacgaaaggaaagggctctcaagggctcttctgctcatctcttccgtgagatttgctcccagaccctctgatctccctccaacaaaccctggctccagccccctttcccaacttgagttgcatcatcttggaaccaggaagcccagctaaagccaagagaccagagagtccctgccactagttttcatcagtctgttcaagcaaagttgatctgctcctggcacgtccagtaaattccagaatcattctcctttctgcccataaagggccttggagaattgctttaagaagagtgaatgttccaatgatgatagatattataagcgatgatggttctgttgctatgaacacagcagtcggtccctgtcattgtccacccaggagtggccttgttaattccaagtggcatgtatcttccctctgagcttcatttcttcaagatgctctgggtggtgggatgggagaccatcctcagccctcctcagaccttatcaattcattgagagattgcaaagctgaaagcacctccggccactcctgggagacagaccctttggtgatgaaataaaccagtgacttcagagcctatggtctcaactgtgcttgaaaaacactgtctctgaaaacaactttgtgattctccctgctccctgtggacaaaagcacataattctgctgttacgggtactttgctcatacgagctttcatgttcagcatgcaatggaatcatgcttgtccatgtgaaataaatatggctctctcgtgtccttaaaaaaaaaaaaaaaaaa

SEQ ID NO: 115 - DNA, 4909 bp, homo sapiens
ttcggagcgcgaagccgccgctgggacctcggcgcgccccgcgtctgcgcttgctgccgcgccccggtcggcgcgctgggagttccagccatgctcttctggcacacgcagcccgagcactacaaccagcacaactccggcagctacctgcgtgatgtgctcgctctgcccatcttcaagcaggaggaaccccagctgtcccccgagaacgaggcccgcctgccacccctgcaatatgtgttgtgtgctgccacgtccccagccgtgaagctgcatgaagagacgctgacctacctcaaccaaggtcagtcttatgaaatccgactactggagaatcggaagctgggagactttcaagatctgaacacaaaatatgtcaagagcatcatccgtgtggtcttccatgaccgccggctgcagtatacggagcaccagcagctggagggctggcggtggagtcggccaggggaccggatcctggacatcgatattccactgtctgttggtatcttggaccccagggccagcccgacccagctgaatgcagtcgagtttttgtgggaccctgcgaagagagcttctgcattcattcaggtacactgcatcagcacagaattcacccccaggaagcacgggggcgagaagggagtgccctttcgagtccagattgacacgtttaagcagaacgagaatggggagtacacggagcacctgcactcagccagctgccagatcaaggtgttcaagccgaagggagccgatcggaaacagaagactgaccgggagaagatggagaaaagaactgcccaagagaaggagaaataccagccgtcctatgaaaccaccatcctcacagagtgctctccatggcccgacgtggcctaccaggtgaacagcgccccgtccccaagctacaatggttctccaaacagctttggcctcggcgaaggcaacgcctctccgacccacccggtggaggccctgcccgtgggcagtgaccacctgctcccatcagcttcgatccaggatgcccagcagtggcttcaccgcaacaggttctcgcagttctgccggctctttgccagcttctcaggtgctgacttgctgaagatgtcccgagatgatttggtccagatctgtggtcccgcagatgggatccggctcttcaacgccatcaaaggccggaatgtgaggccaaagatgaccatttatgtctgtcaggagctggagcagaatcgagtgcccctgcagcagaagcgggacggcagtggagacagcaacctgtctgtgtaccacgccatcttcctggaagagctgaccaccttggagctgattgagaagattgccaacctgtacagcatctccccccagcacatccaccgagtctaccggcagggccccacgggcatccatgtggtggtgagcaacgagatggtgcagaacttccaagatgaatcctgttttgtcctcagcacaattaaagctgagagcaatgatggctaccacatcatcctgaaatgtggactctgagcagcagtggacctcatacctgtctccagctcccagccctgtggatccccgtggatgtagacattgccccactgtaagctgtggcctcaccaggcaagctgaggccaggagggaccctgcccagtctgtgaaagctacagagcaccaaccagcagaagcctgtggacaccaagtacggtgtacagaaagccagtggctcctttctcccttcctcttggcctccagattttgaatggttccttgttcttttctattggtccaaccctgacgttctaaaagggcaaacagtggagacgtctgctctgaaatccctcatcccttagttggaagctgattgggtatcttggtgctgcctgtattggtcccttctgaccactctcctgcctccagagaaagctctgcttcaccctgaaagctggtacctttacctcctcctctgggagttggctgcatggccagcactgccgacttgatgggagcagtttgccctcattctcctgtttcaggtttgcttcccttctcagtgaccctggtgagcatccgcctttcctgttcttggatgaattgatgggagtggggctattctgtgccttctacctctttcttctctacgttgtttctaaggatctgctgctgcggaacccaaagatgtgctcctgtctctgcactggcgcattggcatggtagatgccacaatgtatgtgcacggcctttctcagagacattagttctgaggccctttgtggggaggttagggggatggtaatagaaaaagactattttatttcctggcaatcacgggtaaggaggattaggaatgagtattccattcctaggtgtcatcagatgaccttgaccaccacaataccaggccctcttggatggacttatagaaagttagagaagaccttgttgaaccgctgctaaacttgccacaggagcgatgtgttttctctgagtgcccctcacttacatgtttatctttgtttgtagaggctatgtttaggatattttgcctgcatcagaatgggtgcatcatctttcttaatggcctatcgggaaatttgagtgtcagtaactgtggtagactcagaaattcgtctttgtcttgcctctggttcctgggatccagtgatctctactggcccagggcttcagctcttggttaatttaggttcatggggaaccctctgaccacctgaatgggatgtcatagcttctaaatggagcttctgtggaatgaagtgctagactgaaggactaccagaataaaacagggtctacaatggggagaacttgttttatagatgaggaaaccaaggctcagaggggcaaagtcacctgcatggtagcacatagtgatagggtagcgatataaatttatcatataaaccaggacatctcggaataaaaggggctctgttagtcattatgttgggtaatagccatggcattcctacagaacagagtgaggacaggctcctgattcctcttccttctttagagagaagcggggagtgggttaactaacagctttattgagatgtcattcacatgccattcagtttacccattgctagtgtccaattgtattcacagaaccaccatcaattcacagaattacagtcaacgttggtacattttcatcacccccagtaaaaccccgtacccttggtctgtcactcctgctttcctaactcctgcagtccaaggcagccatgaatctactttctatgtaagattaacctactctggacatttcatatatctggaatcatgtgatatctcttttgtgactggcttcttccactgaatgttttctagggccgtccaagttgaggatgtatcagtacttcattcttttgtattgctgaataatacttcattgtatagatagaccacatttgtttattgattcatcagttgatggacatttgtgtgtttttactttttggctactctgaatgatgctgctatgaacatatttctacaagattttgtgtggacatatgttttcatttcttttagcaatatacataggagtggaattgctaggtcttacagtaactccgtgttttaactttttgagaaactgccagactgttttctatagcagctgtaccattttacattcccaccagcaatgtatccaggtttcaatttgtctacatcctcatcaacacttgctattatctgtctttttgcttttagcatcctaatgagtatgaaatgctatcttgtggttttgatttgcattcccctgatggcaactgatgctgagtgtcttttcctgtgcttacgggccatgcgtatttctttggagaaaggtctatccaggtcctttgcctatttttaattgagttgtcttttttttttaagttttctgttttcctaaccactagactaccagggatgagccttctttttattattgagttgggtgagctatttgtatattctagacgccagtcttttatcaggtatatgactggtaaaaatgttctccccttctgtggattgttttcagtttcttgttggtgtcctttgagacacaaaactttttaactttgatgatttccaagatacgtattttttttctattgtcacttgtgcttttggtgccatatctagaaaaccattgcctaatccaaggtcaagaagattaatgcctgtgttttcttctaagaacttgtatagttttagttctcacaatggtctttgatccatttcgagtatatttttatatatgatgtgatgtaggggtccagcttcattcttttgcttgtggatctccacttgtcccactgctgattattgagaaaaatatcctttctccacggaattgtcttggcatccttgctaaaggcctctgcttcttactggatcttctttcctgggacatggtgtcgttgggaagcttacctttttttttttttacttagtctgtgtttggttccaccagttttatgctgcctttctactctgttcttgctgtctccctctttacctgagtcaacggtactgagtcctatctctctctgatgttccccagtcttccttggtgcatgttctagctccacacactagtccttggaggaaggttgagaccaatgatttcctgttatgagtcatgaggaaactgaatcacctagaagtggaataatgtgctcagggtcaccatagcccattagtggaaggaccaggactagacctttagtcttctgaggtccagccccttaggctgtctgtcatcactgtacccaagtgatgtcactaccaaggccaaatgatggtgggctaaattttaattctcaaaagtgtaggaggctaatattgtcttctaagttccaaaagaagatgtaataaaagtctgttacct

SEQ ID NO: 116 - DNA, 3260 bp, homo sapiens
tcgaaacagctgccggctggtcccggccgaggccggcgcagggagggaggagccgcccgggctgtgggggcgccgcgagctgggccggcctcggtgtgcccgcgccgccagcccgctccagacgcgccacctgggcgctccaagaagaggccgaagtttgccgcggccgtgagttggagctcgcgccgggccgctgcgccgggagctccgggggcttccctcgcttcccggtattgtttgcaaactttgctgctctccgccgcggcccccaactcggcggacgccgggcgcggagagccgagccgggggcgctgtgcgcagcgctcgggccaggccgggcgggcatgggcgggggcccgagcaggggtggagagccggggccagcagcagcccgtgcccgggagcggcggcgctgaggggcgcggagctccccgcgaggacacgtccaacgccagcatgcagcgcccgggcccccgcctgtggctggtcctgcaggtgatgggctcgtgcgccgccatcagctccatggacatggagcgcccgggcgacggcaaatgccagcccatcgagatcccgatgtgcaaggacatcggctacaacatgactcgtatgcccaacctgatgggccacgagaaccagcgcgaggcagccatccagttgcacgagttcgcgccgctggtggagtacggctgccacggccacctccgcttcttcctgtgctcgctgtacgcgccgatgtgcaccgagcaggtctctacccccatccccgcctgccgggtcatgtgcgagcaggcccggctcaagtgctccccgattatggagcagttcaacttcaagtggcccgactccctggactgccggaaactccccaacaagaacgaccccaactacctgtgcatggaggcgcccaacaacggctcggacgagcccacccggggctcgggcctgttcccgccgctgttccggccgcagcggccccacagcgcgcaggagcacccgctgaaggacgggggccccgggcgcggcggctgcgacaacccgggcaagttccaccacgtggagaagagcgcgtcgtgcgcgccgctctgcacgcccggcgtggacgtgtactggagccgcgaggacaagcgcttcgcagtggtctggctggccatctgggcggtgctgtgcttcttctccagcgccttcaccgtgctcaccttcctcatcgacccggcccgcttccgctaccccgagcgccccatcatcttcctctccatgtgctactgcgtctactccgtgggctacctcatccgcctcttcgccggcgccgagagcatcgcctgcgaccgggacagcggccagctctatgtcatccaggagggactggagagcaccggctgcacgctggtcttcctggtcctctactacttcggcatggccagctcgctgtggtgggtggtcctcacgctcacctggttcctggccgccggcaagaagtggggccacgaggccatcgaagccaacagcagctacttccacctggcagcctgggccatcccggcggtgaagaccatcctgatcctggtcatgcgcagggtggcgggggacgagctcaccggggtctgctacgtgggcagcatggacgtcaacgcgctcaccggcttcgtgctcattcccctggcctgctacctggtcatcggcacgtccttcatcctctcgggcttcgtggccctgttccacatccggagggtgatgaagacgggcggcgagaacacggacaagctggagaagctcatggtgcgtatcgggctcttctctgtgctgtacaccgtgccggccacctgtgtgatcgcctgctacttttacgaacgcctcaacatggattactggaagatcctggcggcgcagcacaagtgcaaaatgaacaaccagactaaaacgctggactgcctgatggccgcctccatccccgccgtggagatcttcatggtgaagatctttatgctgctggtggtggggatcaccagcgggatgtggatttggacctccaagactctgcagtcctggcagcaggtgtgcagccgtaggttaaagaagaagagccggagaaaaccggccagcgtgatcaccagcggtgggatttacaaaaaagcccagcatccccagaaaactcaccacgggaaatatgagatccctgcccagtcgcccacctgcgtgtgaacagggctggagggaagggcacaggggcgcccggagctaagatgtggtgcttttcttggttgtgtttttctttcttcttcttctttttttttttttataaaagcaaaagagaaatacataaaaaagtgtttaccctgaaattcaggatgctgtgatacactgaaaggaaaaatgtacttaaagggttttgttttgttttggttttccagcgaagggaagctcctccagtgaagtagcctcttgtgtaactaatttgtggtaaagtagttgattcagccctcagaagaaaacttttgtttagagccctccctaaatatacatctgtgtatttgagttggctttgctacccatttacaaataagaggacagataactgctttgcaaattcaagagcctcccctgggttaacaaatgagccatccccagggcccacccccaggaaggccacagtgctgggcggcatccctgcagaggaaagacaggacccggggcccgcctcacaccccagtggatttggagttgcttaaaatagactccggccttcaccaatagtctctctgcaagacagaaacctccatcaaacctcacatttgtgaactcaaacgatgtgcaatacatttttttctctttccttgaaaataaaaagagaaacaagtattttgctatatataaagacaacaaaagaaatctcctaacaaaagaactaagaggcccagccctcagaaacccttcagtgctacattttgtggctttttaatggaaaccaagccaatgttatagacgtttggactgatttgtggaaaggaggggggaagagggagaaggatcattcaaaagttacccaaagggcttattgactctttctattgttaaacaaatgatttccacaaacagatcaggaagcactaggttggcagagacactttgtctagtgtattctcttcacagtgccaggaaagagtggtttctgcgtgtgtatatttgtaatatatgatatttttcatgctccactattttattaaaaataaaatatgttctttagtttgctgctaaaaaaa

SEQ ID NO: 117 - DNA, 1515 bp, homo sapiens
ccggctccggcgctcacctacccccggcaggccccgcccccgtgcggtccctcccggaagcgccggcggagcgtcctcgcatggagcgcgagcccagcgcctcggaggccgcccccgcggcggccgcgctcttcgcctggggtgcaaatagctatgggcaacttggcctcggccataaggaagatgtgctgttgccccagcaactgaatgacttctgtaaacccaggagtgtcaggaggatcacaggaggagggggccactctgcagttgtcacagatggaggagacctctttgtttgtggcctgaacaaagatgggcaactggggcttggtcacacagaggatatcccatattttaccccctgcaaatccctctttggctgtcccatccaacaggtggcctgtggctgggattttacgattatgctcacagaaaatggtcaagttctatcatgtggatccaactcctttggccagttaggagttcctcatggacctcgaagatgtgtggttccccaggccattgagctccataaagagaaggttgtttgtattgctgctggactgaggcatgcagtagctgctacagcgagtggcatcgtgttccagtgggggactggtttggcatcatgtggacgacggttgtgccctgggcagactcttccattgtttttcacagcaaaggaaccaagcagagtgacaggtctagagaattctaaagcaatgtgtgttcttgctggctcagaccactcagcttcattaacagatgcaggagaggtgtatgtttggggaagcaacaagcatgggcaactggctaatgaggctgctttccttcctgtgccccagaaaatagaagcacattgtttccagaatgaaaaggtcactgccatctggagtggatggacacacctggttgctcagacagaaactggcaagatgtttacctggggccgagcagactatggtcagctagggaggaagttggagacttatgaaggctggaaactagaaaagcaagattcatttctcccctgttcaagaccaccgaacagcatgccttcgtctccgcattgcttaactggagcaactgaggtctcttgtggctcagagcataatttggcaataattggtggagtgtgttactcttggggctggaatgagcatggcatgtgcggagatggcactgaagccaacgtctgggccccaaagccggtgcaggctctgctgtcatcgtcaggactccttgtgggctgtggggctggccactccttggccctctgccagctgccagctcaccctgcattggtccaggaccccaaggtcacctacctttccccagatgccatcgaggacactgaatctcagaaagccatggacaaagagagaaactggaaggaaagacaatcagaaacttcaacccaaagccaatctgactggtccagaaatgggggactgtgatagagaatctttaataaagtggcttttcccaccaaaaaaaaaaaaaaaaaaaaaaaaa

SEQ ID NO: 118 - DNA, 1930 bp, homo sapiens
gaccaagtggctcctgcgatggcggcggaagaggaggctgcggcgggaggtaaagtgttgagagaggagaaccagtgcattgctcctgtggtttccagccgcgtgagtccagggacaagaccaacagctatggggtctttcagctcacacatgacagagtttccacgaaaacgcaaaggaagtgattcagacccatcccagtcaggaatcatgacagaaaaagtggtggaaaagctttctcagaatccccttacctatcttctttcaacaaggatagaaatatcagcctccagtggcagcagagtggaagatggtgaacaccaagttaaaatgaaggccttcagagaagctcatagccaaactgaaaagcggaggagagataaaatgaataacctgattgaagaactgtctgcaatgatccctcagtgcaaccccatggcgcgtaaactggacaaacttacagttttaagaatggctgttcaacacttgagatctttaaaaggcttgacaaattcttatgtgggaagtaattatagaccatcatttcttcaggataatgagctcagacatttaatccttaagactgcagaaggcttcttatttgtggttggatgtgaaagaggaaaaattctcttcgtttctaagtcagtctccaaaatacttaattatgatcaggctagtttgactggacaaagcttatttgacttcttacatccaaaagatgttgccaaagtaaaggaacaactttcttcttttgatatttcaccaagagaaaagctaatagatgccaaaactggtttgcaagttcacagtaatctccacgctggaaggacacgtgtgtattctggctcaagacgatcttttttctgtcggataaagagttgtaaaatctctgtcaaagaagagcatggatgcttacccaactcaaagaagaaagagcacagaaaattctatactatccattgcactggttacttgagaagctggcctccaaatattgttggaatggaagaagaaaggaacagtaagaaagacaacagtaattttacctgccttgtggccattggaagattacagccatatattgttccacagaacagtggagagattaatgtgaaaccaactgaatttataacccggtttgcagtgaatggaaaatttgtctatgtagatcaaagggcaacagcgattttaggatatctgcctcaggaacttttgggaacttcttgttatgaatattttcatcaagatgaccacaataatttgactgacaagcacaaagcagttctacagagtaaggagaaaatacttacagattcctacaaattcagagcaaaagatggctcttttgtaactttaaaaagccaatggtttagtttcacaaatccttggacaaaagaactggaatatattgtatctgtcaacactttagttttgggacatagtgagcctggagaagcatcatttttaccttgtagctctcaatcatcagaagaatcctctagacagtcctgtatgagtgtacctggaatgtctactggaacagtacttggtgctggtagtattggaacagatattgcaaatgaaattctggatttacagaggttacagtcttcttcataccttgatgattcgagtccaacaggtttaatgaaagatactcatactgtaaactgcaggagtatgtcaaataaggagttgtttccaccaagtccttctgaaatgggggagctagaggctaccaggcaaaaccagagtactgttgctgtccacagccatgagccactcctcagtgatggtgcacagttggatttcgatgccctatgtgacaatgatgacacagccatggctgcatttatgaattacttagaagcagaggggggcctgggagaccctggggacttcagtgacatccagtggaccctctagc

SEQ ID NO: 119 - DNA, 417 bp, homo sapiens
aaactataaacatatattgtaaatgttagcatattatatacattgcatattaacataagctaaaatcattgatataaatttatataaacaaaaggtagaaaatatgacaatgttcttcttgttttttgtctttgcatatttctttattggcccttgtcaaacgtgacccactaactcctgaatgctttctctctccccatggattcctaaggatgtcaccacagtgctggccagatgcacagatcacaggtgactgaacctcatcaccccacgaacacacccttcaggttttgccaagaatgacactgtaaatataacaaagctcctgtgcttgttagtgaacaccaattcagcttctctcctgtatttggaaatcaggatgagatgaaaacaacaagcaggccaggcacggtggct

SEQ ID NO: 120 - DNA, 430 bp, homo sapiens
gacagccacgaagatcctaccaaaatgaagcgcttcctcttcctcctactcaccatcagcctcctggttatggtacagatacaaactggactctcaggacaaaacgacaccagccaaaccagcagcccctcagcatccagcagcatgagcggaggcattttccttttcttcgtggccaatgccataatccacctcttctgcttcagttgaggtgacacgtctcagccttagccctgtgccccctgaaacagctgccaccatcactcgcaagagaatcccctccatctttgggaggggttgatgccagacatcaccaggttgtagaagttgacaggcagtgccatgggggcaacagccaaaataggggggtaatgatgtaggggccaagcagtgcccagctgggggagaataaagttacccttgtactgca

SEQ ID NO: 121 - DNA, 2675 bp, homo sapiens
aaaacattcaacaaattaatgggtgtaaggaactggaaaacctggactcctaccacatgcagataaaaccaatagagtgcagaataagactcaagtcaagtaagtaacgttaaacaccataaagacacatggccttctttgtgtacatgacatgcattctcaacaatgcactgacggatatgagtgggatcctgtgagacagcaatgcaaagatattgatgaatgtgacattgtcccagacgcttgtaaaggtggaatgaagtgtgtcaaccactatggaggatacctctgccttccgaaaacagcccagattattgtcaataatgaacagcctcagcaggaaacacaaccagcagaaggaacctcaggggcaaccaccggggttgtagctgccagcagcatggcaaccagtggagtgttgcccgggggtggttttgtggccagtgctgctgcagtcgcaggccctgaaatgcagactggccgaaataactttgtcatccggcggaacccagctgaccctcagcgcattccctccaacccttcccaccgtatccagtgtgcagcaggctacgagcaaagtgaacacaacgtgtgccaagacatagacgagtgcactgcagggacgcacaactgtagagcagaccaagtgtgcatcaatttacggggatcctttgcatgtcagtgccctcctggatatcagaagcgaggggagcagtgcgtagacatagatgaatgtaccatccctccatattgccaccaaagatgcgtgaatacaccaggctcattttattgccagtgcagtcctgggtttcaattggcagcaaacaactatacctgcgtagatataaatgaatgtgatgccagcaatcaatgtgctcagcagtgctacaacattcttggttcattcatctgtcagtgcaatcaaggatatgagctaagcagtgacaggctcaactgtgaagacattgatgaatgcagaacctcaagctacctgtgtcaatatcaatgtgtcaatgaacctgggaaattctcatgtatgtgcccccagggataccaagtggtgagaagtagaacatgtcaagatataaatgagtgtgagaccacaaatgaatgccgggaggatgaaatgtgttggaattatcatggcggcttccgttgttatccacgaaatccttgtcaagatccctacattctaacaccagagaaccgatgtgtttgcccagtctcaaatgccatgtgccgagaactgccccagtcaatagtctacaaatacatgagcatccgatctgataggtctgtgccatcagacatcttccagatacaggccacaactatttatgccaacaccatcaatacttttcggattaaatctggaaatgaaaatggagagttctacctacgacaaacaagtcctgtaagtgcaatgcttgtgctcgtgaagtcattatcaggaccaagagaacatatcgtggacctggagatgctgacagtcagcagtatagggaccttccgcacaagctctgtgttaagattgacaataatagtggggccattttcattttagtcttttctaagagtcaaccacaggcatttaagtcagccaaagaatattgttaccttaaagcactattttatttatagatatatctagtgcatctacatctctatactgtacactcacccataacaaacaattacaccatggtataaagtgggcatttaatatgtaaagattcaaagtttgtctttattactatatgtaaattagacattaatccactaaactggtcttcttcaagagagctaagtatacactatctggtgaaacttggattctttcctataaaagtgggaccaagcaatgatgatcttctgtggtgcttaaggaaacttactagagctccactaacagtctcataaggaggcagccatcataaccattgaatagcatgcaagggtaagaatgagtttttaactgctttgtaagaaaatggaaaaggtcaataaagatatatttctttagaaaatggggatctgccatatttgtgttggtttttattttcatatccagcctaaaggtggttgtttattatatagtaataaatcattgctgtacaacatgctggtttctgtagggtatttttaattttgtcagaaattttagattgtgaatattttgtaaaaaacagtaagcaaaattttccagaattcccaaaatgaaccagataccccctagaaaattatactattgagaaatctatggggaggatatgagaaaataaattccttctaaaccacattggaactgacctgaagaagcaaactcggaaaatataataacatccctgaattcaggcattcacaagatgcagaacaaaatggataaaaggtatttcactggagaagttttaatttctaagtaaaatttaaatcctaacacttcactaatttataactaaaatttctcatcttcgtacttgatgctcacagaggaagaaaatgatgatggtttttattcctggcatccagagtgacagtgaacttaagcaaattaccctcctacccaattctatggaatattttatacgtctccttgtttaaaatctgactgctttactttgatgtatcatatttttaaataaaaataaatattcctttagaagatcactctaaaa

SEQ ID NO: 122 - DNA, 5509 bp, homo sapiens
aggaaaagacaatttctctctgattcagaatcctgaaaatgtgatctcccttaaaaagaggacagtgctgctgtgagtttgacgaagtggacatcacctgcagtcagtccagagctgcccagtcttgaatataatcatggccaaaccttatgaatttaactggcagaaggaagttccctcctttttgcaagaaggaacagtttttgacagatacgaggaggaatcctttgtgtttgaacccaactgcctcttcaaagtggatgagtttggcttctttctgacatggagaagtgaaggcaaggaaggacaggtgctagaatgctccctcatcaacagtattcggtcgggagccataccaaaggatcccaaaatcttggctgctcttgaagctgttggaaaatcagaaaatgatctggaagggcggatagtttgtgtctgcagtggcacagatctagtgaacattagttttacctacatggtggctgaaaatccagaagtaactaagcaatgggtagaaggcctgagatcaatcatacacaacttcagggccaacaacgtcagtccaatgacatgcctcaagaaacactggatgaaattggcatttatgaccaacacaaatggtaaaattccagttaggagtattactagaacatttgcatcgggaaaaacagaaaaggtgatctttcaagcactcaaggagttaggtcttcccagtggaaagaatgatgaaattgagcccacagcattttcttatgaaaagttctatgaactgacacaaaagatttgtcctcggacagatatagaagatcttttcaaaaaaatcaatggagacaaaactgattatttaacggtagaccaattagtgagctttctaaatgaacatcaacgagatcctcgattgaatgaaattttatttccattttatgatgccaaaagggcaatgcagatcattgagatgtatgaacctgatgaagatttgaagaaaaaaggccttatatcaagtgatgggttttgcagatatctgatgtcagatgaaaacgccccagtcttcctagatcgtttagaactttaccaagaaatggaccatcctctggctcactacttcatcagttcttcccataacacttatctcactggcagacagttcggcgggaagtcttcggtagaaatgtacagacaggttctcctggctggttgcagatgtgttgaacttgactgctgggatggaaaaggtgaagaccaagaaccaataataactcatggaaaagcaatgtgtacagatatcctttttaaggatgtaattcaagccatcaaggaaactgcatttgtcacatcagaatatcctgtaattctctcctttgaaaatcactgcagcaaatatcaacagtacaagatgtccaaatattgcgaagatctatttggggatctcctgttgaaacaagcacttgaatcacatccacttgaaccaggcagggctttgccatcccccaatgacctcaaaagaaaaatactcataaaaaacaagcggctgaaacctgaagttgaaaaaaaacagctggaagctttgagaagcatgatggaagctggagaatctgcctccccagcaaacatcttagaggacgataatgaagaggagatcgaaagtgctgaccaagaggaggaagctcaccccgaattcaaatttggaaatgaactttctgctgatgacttgggtcacaaggaagctgttgcaaatagcgtcaagaagggcctggtcactgtagaagatgagcaggcgtggatggcatcttataaatatgtaggtgctaccactaatatccatccatatttgtccacaatgatcaactacgcccagcctgtaaagtttcaaggtttccatgtggcagaagaacgcaatattcattataacatgtcttcttttaatgaatcagtcggtcttggctacttgaagacacatgcaattgaatttgtcaattataacaaacggcaaatgagtcgcatttaccccaagggaggccgagtcgattccagtaattacatgcctcagattttctggaacgctggctgccagatggtttcactgaactatcaaaccccagatttagcgatgcaattgaatcagggaaaatttgagtataatggatcgtgcgggtaccttctcaaaccagatttcatgaggcggcctgatcgaacatttgaccccttctctgaaactcctgttgatggtgttattgcagccacttgctcagtgcaggttatatcaggtcaattcttatcagataagaaaattggcacctacgtagaggtggatatgtatgggttgcccactgacaccatacgtaaggaattccgaactcgcatggttatgaataatggactcaatccagtttacaatgaagagtcatttgtatttcggaaggtgatcctgccggacctggctgtcttgagaatagctgtgtatgatgataacaacaagctgattggccagaggatcctcccgcttgatggcctccaagccggatatcgacacatttcccttcgaaatgagggaaataaaccattatcactaccaacaattttctgcaatattgttcttaaaacatatgtgcctgatggatttggagatatcgtggatgctttatcagatccaaagaaatttctctcaattacagaaaagagagcagaccaaatgagagctatgggcattgaaactagtgacatagccgacgtgcccagtgacacttccaaaaatgacaagaaaggaaaggccaacaccgccaaagcaaatgtgacccctcagagtagctctgagctcagaccaaccaccacggctgccctggcctctggtgtggaagccaagaaaggtattgaacttatccctcaagtaaggatagaagacttaaagcagatgaaggcttacttgaagcatttaaagaaacagcagaaggagctaaattctttaaagaagaaacatgcaaaggaacacagtaccatgcagaagttacactgcacgcaagttgacaaaattgtggcacagtatgacaaagagaagtcgactcatgagaaaatcctagagaaggcaatgaagaagaaggggggaagtaattgtctcgaaatgaaaaaagaaacagaaatcaaaattcagacgctgacatcagatcacaaatctaaggtcaaagagattgtagcacagcacacaaaggaatggtcagaaatgatcaatacccacagtgctgaggagcaagaaatccgagacctgcacctcagccagcagtgtgagctgctgaaaaagctactcatcaatgcccacgagcagcaaacccagcagctgaaactgtcccatgacagggaaagcaaggaaatgcgagcacaccaggctaagatttctatggaaaatagcaaagccatcagccaagataaatctatcaagaataaagcagaacgggaaaggcgagtcagggagttaaacagcagcaacactaaaaagtttctggaagaaagaaagagacttgccatgaagcagtccaaagaaatggatcagttgaaaaaagtccagcttgaacatctagaattcctagagaaacagaatgagcaggcgaaggagatgcagcagatggtgaaattggaagccgagatggaccgcagaccagcaacagtagtatgaaactccaaaatgcaaactgaagcagcaaacccacaaagcatcaaaagactcactcacaaacttctgaacacaaactccatggatgaaagctgtttattttgtttcctttatgtgtaaacaagatgatatctgaaaccagagagacttggaatgtctgactgacttctatttaacagcttgagtattgcatttccttggccaaacaaaaatagctacaaatccacaaaaatttactattccagtaaggcagagtccaaccattgataatacaacttaaacatgtttgctataaaataccatcacaagtaaatgagcttggtgtgaacaactctcctttgtgatgccttaggacatgtttgaactgcagcaaaaaacaaaaacaaaaaacagtgcattagcaatttcatagcaagtgcatgcactaggaaaagaaaactctgtctacaagtttattagcagaagtggtggtctgctagacaaataattttgcaaaatttttctacatctaagttacctcatcagtaagtgccatgtctctaccatgccatcagaggctaatttcctgtaaaagttgtggaaattgttagaacaatagaaaaatagagcagtgtatgtgtgccaaaactcatcattactcaaaggagaactgtgttaggcacatttaagaaagtttacatctgacattgctttataggaattgtttctgcagattccggatattataattcacaccataaagattgtgaagtggttattggcaaacgtttgtaaatgtgaccatgtataaagtatttatactctttaattcacactgttagagagcaaaatcatctaagtattgccacatgacaagattagtaaacaggaatactagaactatgtttgcatgatacacaagcaccaataaagactaatccatacacagttaacctaatgccaaataaatactggttaaataaatgtatggcacagaatataatttgactatcaagacttttagcataatgaaaaaccctctctctatatatatatgtgtatatgaattatgtgggcattcttgatacttcaagttctagtttgaaaaaaatacataactaatttaattttacacaaaaatatttatgcagattttcagaatttcatatcaggaaatgacctttttatgtctgttaaatatcaaaacaatttgctacagtgttaatctgcatggtctttaagcctgctgtagttgagttgcagacagtgcatgaaaaagtattccgctgggaattgagccatgccaccaaagccaagaggagcgcatggaaacccggtagtctagaactaatcagattactgattttagggcacagcaccagatgaattgttgtatatgcttgtaaaaattgattctgtgtgttcctctgaacaaagcggagaaaatgatgataccatcaatattgaaattaaacttccaacttctctaataaaaaattaaaacacgcataacactcgtcaagagtatttgctcccaagacacattctagcaaatgttttgcctttttcatatacatgatatcatcgttattttcaaagggggcttattaataccctcagcatgtttttcacccaaatgatgcaaaacatgcagattctagttgacttcagttgtaatagacttgtttttctcctatttatgatttgaagtggattctgtaaaatatctcttgttcttagtttccttatctgtaaaacagtggagttagactacatatcttttggcactaacatctcatgaaaaattatggttaataaaatatcaccacatttggattgccaattttcaaaaaaaaaaaaaaaaaaaaa

SEQ ID NO: 123 - DNA, 4513 bp, homo sapiens
gcgcggtgccgccgggaaagatggtcgtggcgctgcggtacgtgtggcctctcctcctctgcagcccctgcctgcttatccagatccccgaggaatatgaaggacaccatgtgatggagccacctgtcatcacggaacagtctccacggcgcctggttgtcttccccacagatgacatcagcctcaagtgtgaggccagtggcaagcccgaagtgcagttccgctggacgagggatggtgtccacttcaaacccaaggaagagctgggtgtgaccgtgtaccagtcgccccactctggctccttcaccatcacgggcaacaacagcaactttgctcagaggttccagggcatctaccgctgctttgccagcaataagctgggcaccgccatgtcccatgagatccggctcatggccgagggtgcccccaagtggccaaaggagacagtgaagcccgtggaggtggaggaaggggagtcagtggttctgccttgcaaccctcccccaagtgcagagcctctccggatctactggatgaacagcaagatcttgcacatcaagcaggacgagcgggtgacgatgggccagaacggcaacctctactttgccaatgtgctcacctccgacaaccactcagactacatctgccacgcccacttcccaggcaccaggaccatcattcagaaggaacccattgacctccgggtcaaggccaccaacagcatgattgacaggaagccgcgcctgctcttccccaccaactccagcagccacctggtggccttgcaggggcagccattggtcctggagtgcatcgccgagggctttcccacgcccaccatcaaatggctgcgccccagtggccccatgccagccgaccgtgtcacctaccagaaccacaacaagaccctgcagctgctgaaagtgggcgaggaggatgatggcgagtaccgctgcctggccgagaactcactgggcagtgcccggcatgcgtactatgtcaccgtggaggctgccccgtactggctgcacaagccccagagccatctatatgggccaggagagactgcccgcctggactgccaagtccagggcaggccccaaccagaggtcacctggagaatcaacgggatccctgtggaggagctggccaaagaccagaagtaccggattcagcgtggcgccctgatcctgagcaacgtgcagcccagtgacacaatggtgacccaatgtgaggcccgcaaccggcacgggctcttgctggccaatgcctacatctacgttgtccagctgccagccaagatcctgactgcggacaatcagacgtacatggctgtccagggcagcactgcctaccttctgtgcaaggccttcggagcgcctgtgcccagtgttcagtggctggacgaggatgggacaacagtgcttcaggacgaacgcttcttcccctatgccaatgggaccctgggcattcgagacctccaggccaatgacaccggacgctacttctgcctggctgccaatgaccaaaacaatgttaccatcatggctaacctgaaggttaaagatgcaactcagatcactcaggggccccgcagcacaatcgagaagaaaggttccagggtgaccttcacgtgccaggcctcctttgacccctccttgcagcccagcatcacctggcgtggggacggtcgagacctccaggagcttggggacagtgacaagtacttcatagaggatgggcgcctggtcatccacagcctggactacagcgaccagggcaactacagctgcgtggccagtaccgaactggatgtggtggagagtagggcacagctcttggtggtggggagccctgggccggtgccacggctggtgctgtccgacctgcacctgctgacgcagagccaggtgcgcgtgtcctggagtcctgcagaagaccacaatgcccccattgagaaatatgacattgaatttgaggacaaggaaatggcgcctgaaaaatggtacagtctgggcaaggttccagggaaccagacctctaccaccctcaagctgtcgccctatgtccactacacctttagggttactgccataaacaaatatggccccggggagcccagcccggtctctgagactgtggtcacacctgaggcagccccagagaagaaccctgtggatgtgaagggggaaggaaatgagaccaccaatatggtcatcacgtggaagccgctccggtggatggactggaacgccccccaggttcagtaccgcgtgcagtggcgccctcaggggacacgagggccctggcaggagcagattgtcagcgaccccttcctggtggtgtccaacacgtccaccttcgtgccctatgagatcaaagtccaggccgtcaacagccagggcaagggaccagagccccaggtcactatcggctactctggagaggactacccccaggcaatccctgagctggaaggcattgaaatcctcaactcaagtgccgtgctggtcaagtggcggccggtggacctggcccaggtcaagggccacctccgcggatacaatgtgacgtactggagggagggcagtcagaggaagcacagcaagagacatatccacaaagaccatgtggtggtgcccgccaacaccaccagtgtcatcctcagtggcttgcggccctatagctcctaccacctggaggtgcaggcctttaacgggcgaggatcggggcccgccagcgagttcaccttcagcaccccagagggagtgcctggccaccccgaggcgttgcacctggagtgccagtcgaacaccagcctgctgctgcgctggcagcccccactcagccacaacggcgtgctcaccggctacgtgctctcctaccaccccctggatgaggggggcaaggggcaactgtccttcaaccttcgggaccccgaacttcggacacacaacctgaccgatctcagcccccacctgcggtaccgcttccagcttcaggccaccaccaaagagggccctggtgaagccatcgtacgggaaggaggcactatggccttgtctgggatctcagattttggcaacatctcagccacagcgggtgaaaactacagtgtcgtctcctgggtccccaaggagggccagtgcaacttcaggttccatatcttgttcaaagccttgggagaagagaagggtggggcttccctttcgccacagtatgtcagctacaaccagagctcctacacgcagtgggacctgcagcctgacactgactacgagatccacttgtttaaggagaggatgttccggcaccaaatggctgtgaagaccaatggcacaggccgcgtgaggctccctcctgctggcttcgccactgagggctggttcatcggctttgtgagtgccatcatcctcctgctcctcgtcctgctcatcctctgcttcatcaagcgcagcaagggcggcaaatactcagtgaaggataaggaggacacccaggtggactctgaggcccgaccgatgaaagatgagaccttcggcgagtacagtgacaacgaggagaaggcctttggcagcagccagccatcgctcaacggggacatcaagcccctgggcagtgacgacagcctggccgattatgggggcagcgtggatgttcagttcaacgaggatggttcgttcattggccagtacagtggcaagaaggagaaggaggcggcagggggcaatgacagctcaggggccacttcccccatcaaccctgccgtggccctagaatagtggagtccaggacaggagatgctgtgcccctggccttgggatccaggcccctccctctccagcaggcccatgggaggctggagttggggcagaggagaacttgctgcctcggatccccttcctaccacccggtccccactttattgccaaaacccagctgcaccccttcctgggcacacgctgctctgccccagcttgggcagatctcccacatgccaggggcctttgggtgctgttttgccagcccatttgggcagagaggctgtggtttgggggagaagaagtaggggtggcccgaaagggtctccgaaatgctgtctttcttgctccctgactgggggcagacatggtggggtctcctcaggaccagggttggcaccttccccctcccccagccactccccagccagcctggctgggactgggaacagaactcggtgtccccaccatctgctgtcttttctttgccatctctgctccaaccgggatgggagccgggcaaactggccgcgggggcaggggaggccatctggagagcccagagtccccccactcccagcatcgcactctggcagcaccgcctcttcccgccgcccagcccaccccatggccggctttcaggagctccatacacacgctgccttcggtacccaccacacaacatccaagtggcctccgtcactacctggctgcggggcgggcacacctcctcccactgcccactggccggc

SEQ ID NO: 124 - DNA, 1918 bp, homo sapiens; identical to SEQ ID NO: 20

SEQ ID NO: 125 - DNA, 3627 bp, homo sapiens
gtctaggagccagccccacccttagaaaagatgttttccatgaggatcgtctgcctagttctaagtgtggtgggcacagcatggactgcagatagtggtgaaggtgactttctagctgaaggaggaggcgtgcgtggcccaagggttgtggaaagacatcaatctgcctgcaaagattcagactggcccttctgctctgatgaagactggaactacaaatgcccttctggctgcaggatgaaagggttgattgatgaagtcaatcaagattttacaaacagaataaataagctcaaaaattcactatttgaatatcagaagaacaataaggattctcattcgttgaccactaatataatggaaattttgagaggcgatttttcctcagccaataaccgtgataatacctacaaccgagtgtcagaggatctgagaagcagaattgaagtcctgaagcgcaaagtcatagaaaaagtacagcatatccagcttctgcagaaaaatgttagagctcagttggttgatatgaaacgactggaggtggacattgatattaagatccgatcttgtcgagggtcatgcagtagggctttagctcgtgaagtagatctgaaggactatgaagatcagcagaagcaacttgaacaggtcattgccaaagacttacttccctctagagataggcaacacttaccactgataaaaatgaaaccagttccagacttggttcccggaaattttaagagccagcttcagaaggtacccccagagtggaaggcattaacagacatgccgcagatgagaatggagttagagagacctggtggaaatgagattactcgaggaggctccacctcttatggaaccggatcagagacggaaagccccaggaaccctagcagtgctggaagctggaactctgggagctctggacctggaagtactggaaaccgaaaccctgggagctctgggactggagggactgcaacctggaaacctgggagctctggacctggaagtactggaagctggaactctgggagctctggaactggaagtactggaaaccaaaaccctgggagccctagacctggtagtaccggaacctggaatcctggcagctctgaacgcggaagtgctgggcactggacctctgagagctctgtatctggtagtactggacaatggcactctgaatctggaagttttaggccagatagcccaggctctgggaacgcgaggcctaacaacccagactggggcacatttgaagaggtgtcaggaaatgtaagtccagggacaaggagagagtaccacacagaaaaactggtcacttctaaaggagataaagagctcaggactggtaaagagaaggtcacctctggtagcacaaccaccacgcgtcgttcatgctctaaaaccgttactaagactgttattggtcctgatggtcacaaagaagttaccaaagaagtggtgacctccgaagatggttctgactgtcccgaggcaatggatttaggcacattgtctggcataggtactctggatgggttccgccataggcaccctgatgaagctgccttcttcgacactgcctcaactggaaaaacattcccaggtttcttctcacctatgttaggagagtttgtcagtgagactgagtctaggggctcagaatctggcatcttcacaaatacaaaggaatccagttctcatcaccctgggatagctgaattcccttcccgtggtaaatcttcaagttacagcaaacaatttactagtagcacgagttacaacagaggagactccacatttgaaagcaagagctataaaatggcagatgaggccggaagtgaagccgatcatgaaggaacacatagcaccaagagaggccatgctaaatctcgccctgtcagagactgtgatgatgtcctccaaacacatccttcaggtacccaaagtggcattttcaatatcaagctaccgggatccagtaagattttttctgtttattgcgatcaagagaccagtttgggaggatggcttttgatccagcaaagaatggatggatcactgaattttaaccggacctggcaagactacaagagaggtttcggcagcctgaatgacgagggggaaggagaattctggctaggcaatgactacctccacttactaacccaaaggggctctgttcttagggttgaattagaggactgggctgggaatgaagcttatgcagaatatcacttccgggtaggctctgaggctgaaggctatgccctccaagtctcctcctatgaaggcactgcgggtgatgctctgattgagggttccgtagaggaaggggcagagtacacctctcacaacaacatgcagttcagcacctttgacagggatgcagaccagtgggaagagaactgtgcagaagtctatgggggaggctggtggtataataactgccaagcagccaatctcaatggaatctactaccctgggggctcctatgacccaaggaataacagtccttatgagattgagaatggagtggtctgggtttcctttagaggggcagattattccctcagggctgttcgcatgaaaattaggccccttgtgacccaataggctgaagaagtgggaatgggagcactctgtcttctttgctagagaagtggagagaaaatacaaaaggtaaagcagttgagattctctacaacctaaaaaattcctaggtgctattttcttatcctttgtactgtagctaaatgtacctgagacatattagtctttgaaaaataaagttatgtaaggttttttttatctttaaatagctctgtgggttttaacatttttgtaaagatataccaagggccattcagtacatcaggaaagtggcagacagaagcttctctctgcaaccttgaagactattggtttgagaacttctcttcccataccacccaaaatcataatgccattggaaagcaaaaagttgttttatccatttgatttgaattgttttaagccaatattttaaggtaaaactcactgaatctaaccatagctgacctttgtagtagaatttacaacttataattacaatgcacaatttataattacaatatgtatttatgtcttttgctatggagcaaatccaggaaggcaagagaaacattctttcctaaatataaatgaaaatctatcctttaaactcttccactagacgttgtaatgcacacttatttttttcccaaggagtaaccaatttctttctaaaacacatttaaaattttaaaactatttatgaatattaaaaaaagacataattcacacattaataaacaatctcccaagtattgatttaacttcatttttctaataatcataaactatattctgtgacatgctaattattattaaatgtaagtcgttagttcgaaagcctctcactaagtatgatctatgctatattcaaaattcaacccatttactttggtcaatatttgatctaagttgcatctttaatcctggtggtcttgccttctgatttttaatttgtatccttttctattaagatatatttgtcattttctcttgaatatgtattaaaatatcccaagc

SEQ ID NO: 126 - DNA, 11558 bp, homo sapiens
tcggcgggggcccgctcccaggcccgctcccgagcccgttccgctcccgtccgccttcttctcgccttctctccgcgtggctcctccgtcccggcgtctccaaaactgaatgagcgagcggcgcgtagggcgcgcggcggcggcggcggcggcggcggcatggagcgcagtggctgggcccggcagactttcctcctagcgctgttgctgggggcgacgctgagggcgcgcgcggcggctggctattacccccgcttttcgcccttctttttcctgtgcacccaccacggggagctggaaggggatggggagcagggcgaggtgctcatttccctgcatattgcgggcaaccccacctactacgttccgggacaagaataccatgtgacaatttcaacaagcaccttttttgacggcttgctggtgacaggactatacacatctacaagtgttcaggcatcacagagcattggaggttccagtgctttcggatttgggatcatgtctgaccaccagtttggtaaccagtttatgtgcagtgtggtagcctctcacgtgagtcacctgcccacaaccaacctcagtttcatctggattgctccacctgcgggcacaggctgtgtgaatttcatggctacagcaacacaccggggccaggttattttcaaagatgctttagcccagcagttgtgtgaacaaggagctccaacagatgtcactgtgcacccacatctagctgaaatacatagtgacagcattatcctgagagatgactttgactcctaccaccaactgcaattaaatccaaatatatgggttgaatgtaacaactgtgagactggagaacagtgtggcgcgattatgcatggcaatgccgtcaccttctgtgaaccatatggcccacgagaactgattaccacaggccttaatacaacaacagcttctgtcctccaattttccattgggtcaggttcatgtcgctttagttattcagaccccagcatcatcgtgttatatgccaagaataactctgcggactggattcagctagagaaaattagagccccttccaatgtcagcacaatcatccatatcctctaccttcctgaggacgccaaaggggagaatgtccaatttcagtggaagcaggaaaatcttcgtgtaggtgaagtgtatgaagcctgctgggccttagataacatcttgatcatcaattcagctcacagacaagtcgttttagaagatagtctcgacccagtggacacaggcaactggcttttcttcccaggagctacagttaagcatagctgtcagtcagatgggaactccatttatttccatggaaatgaaggcagcgagttcaattttgccaccaccagggatgtagatctttccacagaagatattcaagagcaatggtcagaagaatttgagagccagcctacaggatgggatgtcttgggagctgtcattggtacagaatgtggaacgatagaatcaggcttatcaatggtcttcctcaaagatggagagaggaaattatgcactccatccatggacactaccggttatgggaacctgaggttttactttgtgatgggaggaatttgtgaccctggaaattctcatgaaaatgacataatcctgtatgcaaaaattgaaggaagaaaagagcatataacactggataccctttcctattcctcatataaggttccgtctttggtttctgtggtcatcaatcctgaacttcagactcctgctaccaaattttgtctcaggcaaaagaaccatcaaggacataataggaatgtctgggctgtagactttttccatgtcttgcctgttctcccttctacaatgtctcacatgatacagttttccatcaatctgggatgtggaacgcatcagcctggtaacagtgtcagcttggaattttctaccaaccatgggcgctcctggtccctccttcacactgaatgcttacctgagatctgtgctggaccccacctcccccacagcactgtctactcctctgaaaactacagtgggtggaaccgaataacaattccccttcctaacgcagcactaacccggaacaccaggattcgctggagacaaacaggaccaatccttggaaacatgtgggcaattgataatgtttatattggcccgtcatgtctcaaattctgttctggcagaggacagtgcactagacatggttgcaagtgtgaccctggattttctggcccagcttgtgagatggcatcccagacattcccaatgtttatttctgaaagctttggcagttccaggctctcctcttaccataacttttactctatccgtggtgctgaagtcagctttggttgtggtgtcttggccagtggtaaggccctggttttcaacaaagatgggcggcgtcagctaattacatctttccttgacagctcacaatccaggtttctccagttcacactgagactggggagcaaatctgttctgagcacgtgcagagcccctgatcagcctggtgaaggagttttgttgcattattcttatgataatgggataacttggaaactcctggagcattattcatatctcagctatcatgagcccagaataatctccgtagaactaccaggtgatgcaaagcagtttggaattcagttcagatggtggcaaccgtatcattcttcccagagagaagatgtatgggctattgatgagattatcatgacatctgtgcttttcaacagcattagtcttgactttaccaatcttgtggaggtcactcagtctctgggattctaccttggaaatgttcagccatactgtggccacgactggaccctttgttttacaggagattctaaacttgcctcaagtatgcgctatgtggaaacacaatcaatgcagataggagcatcctatatgattcagttcagtttggtgatgggatgtggccagaaatacaccccacacatggacaaccaggtgaagctggagtactcaaccaaccacggccttacctggcacctcgtccaagaagaatgccttccaagtatgccaagttgtcaggaatttacatcagcaagtatttaccatgccagtgagtttacacagtggaggagagtcatagtgcttcttccccagaaaacttggtccagtgctacccgtttccgctggagccagagctattacacagctcaagacgagtgggctttggacagcatttacattgggcagcagtgccccaacatgtgcagtgggcatggctcatgcgatcatggcatatgcaggtgtgaccaggggtaccaaggcactgaatgccacccagaagctgcccttccgtccacaattatgtcagattttgagaaccagaatggctgggagtctgactggcaagaagttattgggggagaaattgtaaaaccagaacaagggtgtggtgtcatctcttctggatcatctctgtacttcagcaaggctgggaaaagacagctggtgagttgggacctggatacttcttgggtggactttgtccagttctacatccagataggcggagagagtgcttcatgcaacaagcctgacagcagagaggagggcgtcctccttcagtacagcaacaatgggggcatccagtggcacctgctagcagagatgtacttttcagacttcagcaaacccagatttgtctatctggagcttccagctgctgccaagaccccttgcaccaggttccgctggtggcagcccgtgttctcaggggaggactatgaccagtgggcagtcgatgacatcatcattctgtccgagaagcagaagcagatcatcccagttatcaatccaactttacctcagaacttttatgagaagccagcttttgattaccctatgaatcagatgagtgtgtggttgatgttggctaatgaaggaatggttaaaaatgaaaccttctgtgctgccacaccatcagcaatgatatttggaaaatcagatggagatcgatttgcagtaactcgagatttgaccctgaaacctggatatgtgctacagttcaagctaaacataggttgtgccaatcaattcagcagtactgctccagttcttcttcagtactctcatgatgctggtatgtcctggtttctggtgaaagaaggctgttacccggcttctgcaggcaaaggatgcgaaggaaactccagagaactaagtgagcccaccatgtatcacacaggggactttgaagaatggacaagaatcaccattgttattccaaggtctcttgcatccagcaagaccagattccgatggatccaggagagcagctcacagaaaaacgtgcctccatttggtttagatggagtgtacatatccgagccttgtcccagttactgcagtggccatggggactgcatttcaggagtgtgtttctgtgacctgggatatactgctgcacaaggaacctgtgtgtcaaatgtccccaatcacaatgagatgttcgataggtttgaggggaagctcagccctctgtggtacaagataacaggtgcccaggttggaactggctgtggaacacttaacgatggcaaatctctctacttcaatggccctgggaaaagggaagcccggacggtccctctggacaccaggaatatcagacttgttcaattttatatacaaattggaagcaaaacttcaggcattacctgcatcaaaccaagaactagaaatgaagggcttattgttcagtattcaaatgacaatgggatactctggcatttgcttcgagagttggacttcatgtccttcctggaaccacagatcatttccattgacctgccacaggacgcgaagacacctgcaacggcatttcgatggtggcaaccgcaacatgggaagcattcagcccagtgggctttggatgatgttcttataggaatgaatgacagctctcaaactggatttcaagacaaatttgatggctctatagatttgcaagccaactggtatcgaatccaaggaggtcaagttgatattgactgtctctctatggatactgctctgatattcactgaaaacataggaaaacctcgttatgctgagacctgggattttcatgtgtcagcatctacctttttgcagtttgaaatgagcatgggctgtagcaagcccttcagcaactcccacagtgtacagctccagtattctctgaacaatggcaaggactggcatcttgtcaccgaagagtgtgttcctccaaccattggctgtctgcattacacggaaagttcaatttacacctcggaaagattccagaattggaagcggatcactgtctaccttccactctccaccatttctcccaggacccggttcagatggattcaggccaactacactgtgggggctgattcctgggcgattgataatgttgtactggcctcagggtgcccttggatgtgctcaggacgagggatttgtgatgctggacgctgtgtgtgtgaccggggctttggtggaccctattgtgttcctgttgttcctctgccctcgattcttaaagacgatttcaatgggaatttacatcctgacctttggcctgaagtgtatggtgcagagagggggaatctgaatggtgaaaccatcaaatctggaacatctctaatttttaaaggggaaggactaaggatgcttatttcaagagatctagattgtacaaatacaatgtatgtccagttttcacttagatttatagcaaaaagtaccccagagagatctcactctattctgttacaattctccatcagtggaggaatcacttggcacctgatggatgaattttactttcctcaaacaacgaatatacttttcatcaatgttcccttgccatacactgcccaaaccaatgctacaagattcagactctggcaaccttataataacggtaagaaagaagaaatctggattgttgatgacttcattatcgatggaaataatgtaaacaaccctgtgatgctcttggatacatttgattttgggcccagagaagacaattggtttttctatcctggtggtaacatcggtctttattgtccatattcttcaaagggggcacctgaagaagattcagctatggtgtttgtttcaaatgaagttggtgagcattccattaccacccgtgacctaaatgtgaatgagaacaccatcatacaatttgagatcaacgttggctgttcgactgatagctcatccgcggatccagtgagactggaattttcaagggacttcggggcgacctggcaccttctgctgcccctctgctaccacagcagcagccacgtcagctctttatgctccaccgagcaccaccccagcagcacctactacgcaggaaccatgcagggctggaggagggaggtcgtgcactttgggaagctgcacctttgtggatctgtccgtttcagatggtaccagggattttaccctgccggctctcagccagtgacatgggccattgataatgtctacatcggtccccagtgtgaggagatgtgtaatggacaggggagctgtatcaatggaaccaaatgtatatgtgaccctggctactcaggtccaacctgtaaaataagcaccaaaaatcctgattttctcaaagatgatttcgaaggtcagctagaatctgatagattcttattaatgagtggtgggaaaccatctcgaaagtgtggaatcctttctagtggaaacaacctctttttcaatgaagatggcttgcgcatgttgatgacacgagacctggatttatcacatgctagatttgtgcagttcttcatgagactgggatgtggtaaaggcgttcctgaccccaggagtcaacccgtgctcctacagtattctctcaacggtggcctctcgtggagtcttcttcaggagttccttttcagcaattccagcaatgtgggcaggtacattgccctggagatacccttgaaagcccgttctggttctactcgccttcgctggtggcaaccgtctgagaatgggcacttctacagcccctgggttatcgatcagattcttattggaggaaatatttctggtaatacggtcttggaagatgatttcacaacccttgatagtaggaaatggctgcttcacccaggaggcaccaagatgcccgtgtgtggctctactggtgatgccctggtcttcattgaaaaggccagcacccgttacgtggtcagcacagacgttgccgtgaatgaggattccttcctacagatagacttcgctgcctcctgctcagtcacagactcttgttatgcgattgaattggaatactcagtagatcttggattgtcatggcacccattggtaagggactgtctgcctaccaatgtggaatgcagtcgctatcatctgcaacggatcctggtgtcagacactttcaacaagtggactagaatcactctgcctctccctccttataccaggtcccaagccactcgtttccgttggcatcaaccagctccttttgacaagcagcagacatgggcaatagataatgtctatatcggggatggctgcatagacatgtgcagtggccatgggagatgcatccagggaaactgcgtctgtgatgaacagtggggtggcctgtactgtgatgaccccgagacctctcttccaacccaactcaaagacaacttcaatcgagctccatccagtcagaactggctgactgtgaacggagggaaattgagtacagtgtgtggagccgtggcgtcgggaatggctctccatttcagtgggggttgtagtcgattattagtcactgtggatctaaacctcactaatgctgagttcatccaattttacttcatgtatgggtgcctgattacaccaaacaaccgtaaccaaggtgttctcttggaatattctgtcaatggaggcattacctggaacctgctcatggagattttctatgaccagtacagtaagcccgggtttgtgaatatccttctccctcctgatgctaaagagattgccactcgcttccgctggtggcagccaagacatgacggcctggatcagaacgactgggccattgacaatgtcctcatctcaggctctgctgaccaaaggaccgttatgctggacaccttcagcagcgccccagtaccccagcatgagcgctcccctgcagatgccggccctgtcgggaggatcgcctttgacatgtttatggaagacaaaacttcagtgaatgagcactggctattccatgatgattgtacagtagaaagattctgtgactcccctgatggtgtgatgctctgtggcagtcatgatggacgggaggtgtatgcagtgacccatgacctgactcccactgaaggctggattatgcaattcaagatctcagttggatgtaaggtgtctgaaaaaattgcccagaatcaaattcatgtgcagtattctactgacttcggtgtgagttggaattatctggtccctcagtgcttgcctgctgacccaaaatgctctggaagtgtttctcagccatctgtattctttccaactaaagggtggaaaaggatcacctacccacttcctgaaagcttagtgggaaatccggtaaggtttaggttctatcagaagtactcagacatgcagtgggcaatcgataatttctacctgggccctggatgcttggacaactgcaggggccatggagattgcttaagggaacagtgcatctgtgatccgggatactcagggccaaactgctacttgacccacactctgaagactttcctgaaggaacgctttgacagtgaagaaatcaaacctgacttatggatgtccttagaaggtggaagtacttgcactgagtgtggaattcttgccgaggacactgcactctattttgggggatccactgtgagacaagcggttacacaagatttggatcttcgaggtgcaaagttcctgcaatactgggggcgcatcggtagtgagaacaacatgacctcttgccatcgtcccatctgccggaaggaaggcgtgctgttggactactctaccgatggaggaattacctggactttgctccatgagatggattaccagaaatacatttctgttagacacgactacatacttcttcctgaagatgccctcaccaacacaactcgacttcgctggtggcagccttttgtgatcagcaatggaattgtggtctctggggtggagcgtgctcagtgggcactggacaacattttgattggtggagcagaaatcaatcccagccaattggtggacacttttgatgatgaaggcacttcccatgaagaaaactggagtttttaccctaatgctgtaaggacagcaggattttgtggcaatccatcctttcacctctattggccaaataaaaagaaggacaagactcacaatgctctctcctcccgagaactcattatacagccaggatacatgatgcagtttaaaattgtggtgggttgtgaagccacttcttgtggtgaccttcattccgtaatgctggaatacactaaggatgcaagatcggattcctggcagctcgtacagacccagtgccttccttcctcttctaacagcattggctgctcccctttccagttccatgaagccaccatctacaactctgtcaacagctcaagctggaaaagaatcaccatccagctgcctgaccatgtctcctctagtgcaacacagttccgctggatccagaagggagaagaaactgagaagcaaagctgggcaattgaccacgtgtacattggagaggcttgccccaagctctgcagcgggcacggatactgcacgaccggtgccatctgcatctgcgacgagagcttccaaggtgatgactgctctgttttcagtcacgaccttcccagttatattaaagataattttgagtccgcaagagtcaccgaggcaaactgggagaccattcaaggtggagtcataggaagtggctgtgggcagctggccccctacgcccatggagactcactgtactttaatggctgtcagatcaggcaagcagctaccaagcctctggatctcactcgagcaagcaaaatcatgtttgttttgcaaattgggagcatgtcgcagacggacagctgcaacagtgacctgagtggcccccacgctgtggacaaggcagtgctgctgcaatacagcgtcaacaacgggatcacctggcatgtcatcgcccagcaccagccaaaggacttcacacaagctcagagagtgtcttacaatgtccccctggaggcacggatgaaaggagtcttactgcgctggtggcaaccacgccacaatggaacaggtcatgatcaatgggctttggaccatgtggaggtcgtcctcactcgcaaacaaaattacatgatgaatttttcacgacaacatgggctcagacatttctacaacagaagacgaaggtcacttaggcgatacccatgaagaatcaaaaagtttattttttttcttccaacatgtgatgtgttgctctccattcttttaaatctcgcactacatctgatatcaggaaatatctgtgaaggacttggtgattacctgaaagcccttctcaagaccgagtgtacaccactttcccacactgtgaactaatgacaagtgacttatttgctcataagtaaatgtcttcatgttgatgtgtccgtgaaagttgtgatctgttgtaatatcagttacagtggcagtattgacaataagaaacagtttaacagaaaaatgaaatttaagcacaaaaaatttaagagattttatgtttaaaatggcatttagcacagtatttaacattcttggtcacaaagctatttaagtggactgtatttcggctatgtctcatgttttatatgattaaattatcattgtttgtcctttatgtattctcttctacaatacaacacattgaaactgtatttacttgttatgttgtaatattttgctgctgaatttggggctacttatattctgcagaaaattaattgaaatacctattcaagaagatagttgtaaagatattgtatctcctttaatatactccttaaaaatgtatgttggtttagcgttgttttgtggataagaaaaatgcttgaccctgaaatattttctactttaaattgtggatgaagaccctatctcccacaaataagttcccatttccttgtctaaagatctttttttaagtgttctgtggctgatttactaacagtaactgccattttttgtctgtgataacagagtgatttgtaaaacagtggttgttttttcattgtgttttcttcgtggattgttttttctgcgggtcatattcataccttctgatgaagttgtacaacaccagcaacattataatggccctgtagctctgaatgctatttgtgtaactgaaaggttgcactctagggtgaaccaagctataaaagcccatgcttaaataaaaattatgtccaaaagcc

SEQ ID NO: 127 - DNA, 1326 bp, homo sapiens; identical to SEQ ID NO: 34

SEQ ID NO: 128 - DNA, 1605 bp, homo sapiens
agctgagctcagagccttctgtggggtctgcagtggcaaggccagccgccccctgtcttccctctggagctgtttgaggaatgcagttcttttgcataagaaaggcttttctctccagtcattctgcttgctgatcaagaacacttaacagcttcaggctttcctgatactttgacgaaggtaattgggactcccatcaagtctccacacagctagcagccacgtggggcacttctccagcatatgtaagtggaactcagaaggcaacattccctgaacatactcttccaccagaatctcctctacagatttttgctgccccttttaccagtggctgaatctactttctcttatggatcgcttacacctgagacgaactacagaacagcacgtaccagaggtggaagtccaagtcaaacgcagaaggactgcctcactgagcaaccaagagtgtcagttgtacccgaggcgttctcagcagcagcaagtacctgtggtggatttccaggctgaactgaggcaggcattcttagctgagacaccaagaggtggttaaagccatattggagtagcgaggaatctgattccaagcaaaaaccaggctccatctactctttgaagcttctgcccagcttgcattgtttctaggagaacctgcgtcatacctttatctatagccttcccctaggtcttcagaagcatcaagttttaactgtggacattggatttggtggaacagcaatcatgactgttggcaagagtagcaagatgctgcagcacattgactatagaatgagatgtatcctgcaagatggccgaatcttcattggcacctttaaggcttttgacaagcatatgaatttgatcctctgtgattgtgatgagttcagaaagatcaagccaaagaatgcgaagcaaccagagcgtgaagaaaagcgggttttgggtctggtgttgctgcgtggggagaacttggtatccatgactgtggaggggccaccccccaaagatactggcattgctcgggtaccacttgctggagctgctggaggccctggggttggtagggcagctggtagaggagtaccagctggtgtgccaattccccaggcccctgctggattggcaggccctgtccgaggagttgggggaccatcccagcaggtaatgactccacagggaagaggcactgtagcagctgctgctgttgctgcgactgccagtattgctggagccccaacacagtacccaccaggacggggcactccgcccccacccgtcggcagagcaaccccacctccaggcattatggctcctccacctggtatgagaccacccatgggcccaccaattgggcttccccctgctcgagggacgccaataggcatgccgcctccgggaatgagaccccctccaccaggcattagaggtccacctcccccaggaatgcgtccaccaagaccttagcatactgttgatccatctcagtcactttttcccctgcaatgcgtcttgtgaaattgtgtagagtgtttgtgagctttttgttccctcattctgcattaataatagctaataataaatgcatagagcaattaaactgtg

SEQ ID NO: 129 - DNA, 347 bp, homo sapiens
cagagtggagcggccgccggagatgcctgacgcatctgtctgaggagcggtcagtgacgcgatggagcgggcaagggatcgcttacacctgagacgaactacagaacagcacgtaccagaggtggaagtccaagtcaaacgcagaaggactgcctcactgagcaaccaagagtgtcagttgtacccgaggcgttctcagcagcagcaagtacctgtggtggatttccaggctgaactgaggcaggcattcttagctgagacaccaagaggtggttaaagccatattggagtagcgaggaatctgattccaagcaaaaaccagacaatgtaataaaaatattattcat

SEQ ID NO: 130 - DNA, 1616 bp, homo sapiens
caccaagggctggccgcagccactgtagctgagctcagagccttctgtgtggtttgcgggggcaaggtcagctgccccctgccctctctctggggctatttgaggaatgcggcctttttgcataagaaaggcttttctctacagtaactgtggtcgctgatcaatgacaccttcctgatactttgacgaaggtaattgggactcccatcaagtctccacacagctagcagccacgtggggcacttctccagcatatgtaagtggaactcagaaggcaacattccctgaacatactcttccaccagaatctcctctacagatttttgctgccccttttaccagtggctgaatctactttctcttatggatcgcttacacctgagacgaactacagaacagcacgtaccagaggtggaagtccaagtcaaacgcagaaggactgcctcactgagcaaccaagagtgtcagttgtacccgaggcgttctcagcagcagcaagtacctgtggtggatttccaggctgaactgaggcaggcattcttagctgagacaccaagaggtggttaaagccatattggagtagcgaggaatctgattccaagcaaaaaccaggctccatctactctttgaagcttctgcccagcttgcattgtttctaggagaacctgcgtcatacctttatctatagccttcccctaggtcttcagaagcatcaagttttaactgtggacattggatttggtggaacagcaatcatgactgttggcaagagtagcaagatgctgcagcacattgactatagaatgagatgtatcctgcaagatggccgaatcttcattggcacctttaaggcttttgacaagcatatgaatttgatcctctgtgattgtgatgagttcagaaagatcaagccaaagaatgcgaagcaaccagagcgtgaagaaaagcgggttttgggtctggtgttgctgcgtggggagaacttggtatccatgactgtggaggggccaccccccaaagatactggcattgctcgggtaccacttgctggagctgctggaggccctggggttggtagggcagctggtagaggagtaccagctggtgtgccaattccccaggcccctgctggattggcaggccctgtccgaggagttgggggaccatcccagcaggtaatgactccacagggaagaggcactgtagcagctgctgctgttgctgcgactgccagtattgctggagccccaacacagtacccaccaggacggggcactccgcccccacccgtcggcagagcaaccccacctccaggcattatggctcctccacctggtatgagaccacccatgggcccaccaattgggcttccccctgctcgagggacgccaataggcatgccgcctccgggaatgagaccccctccaccaggcattagaggtccacctcccccaggaatgcgtccaccaagaccttagcatactgttgatccatctcagtcactttttcccctgcaatgcgtcttgtgaaattgtgtagagtgtttgtgagctttttgttccctcattctgcattaataatagctaataataaatgcatagagcaattaaactgtg

SEQ ID NO: 131 - DNA, 1751 bp, homo sapiens
caccaagggctggccgcagccactgtagctgagctcagagccttctgtgtggtttgcgggggcaaggtcagctgccccctgccctctctctggggctatttgaggaatgcggcctttttgcataagaaaggcttttctctacagtaactgtggtcgctgatcaatgacaccttcctggtaacatttcatattgcttttttggagatgtaagtgggatctgtggatctgaaaattcacagtggccagctcaccaccacctgatgaaagatacaccacagggtgagagcatcctaacagcaaactgcaaatgagatactttgacgaaggtaattgggactcccatcaagtctccacacagctagcagccacgtggggcacttctccagcatatgtaagtggaactcagaaggcaacattccctgaacatactcttccaccagaatctcctctacagatttttgctgccccttttaccagtggctgaatctactttctcttatggatcgcttacacctgagacgaactacagaacagcacgtaccagaggtggaagtccaagtcaaacgcagaaggactgcctcactgagcaaccaagagtgtcagttgtacccgaggcgttctcagcagcagcaagtacctgtggtggatttccaggctgaactgaggcaggcattcttagctgagacaccaagaggtggttaaagccatattggagtagcgaggaatctgattccaagcaaaaaccaggctccatctactctttgaagcttctgcccagcttgcattgtttctaggagaacctgcgtcatacctttatctatagccttcccctaggtcttcagaagcatcaagttttaactgtggacattggatttggtggaacagcaatcatgactgttggcaagagtagcaagatgctgcagcacattgactatagaatgagatgtatcctgcaagatggccgaatcttcattggcacctttaaggcttttgacaagcatatgaatttgatcctctgtgattgtgatgagttcagaaagatcaagccaaagaatgcgaagcaaccagagcgtgaagaaaagcgggttttgggtctggtgttgctgcgtggggagaacttggtatccatgactgtggaggggccaccccccaaagatactggcattgctcgggtaccacttgctggagctgctggaggccctggggttggtagggcagctggtagaggagtaccagctggtgtgccaattccccaggcccctgctggattggcaggccctgtccgaggagttgggggaccatcccagcaggtaatgactccacagggaagaggcactgtagcagctgctgctgttgctgcgactgccagtattgctggagccccaacacagtacccaccaggacggggcactccgcccccacccgtcggcagagcaaccccacctccaggcattatggctcctccacctggtatgagaccacccatgggcccaccaattgggcttccccctgctcgagggacgccaataggcatgccgcctccgggaatgagaccccctccaccaggcattagaggtccacctcccccaggaatgcgtccaccaagaccttagcatactgttgatccatctcagtcactttttcccctgcaatgcgtcttgtgaaattgtgtagagtgtttgtgagctttttgttccctcattctgcattaataatagctaataataaatgcatagagcaattaaactgtg

SEQ ID NO: 132 - DNA, 1643 bp, homo sapiens
caccaagggctggccgcagccactgtagctgagctcagagccttctgtgtggtttgcgggggcaaggtcagctgccccctgccctctctctggggctatttgaggaatgcggcctttttgcataagaaaggcttttctctacagtaactgtggtcgctgatcaatgacaccttcctggtaacatttcatattgcttttttggagatactttgacgaaggtaattgggactcccatcaagtctccacacagctagcagccacgtggggcacttctccagcatatgtaagtggaactcagaaggcaacattccctgaacatactcttccaccagaatctcctctacagatttttgctgccccttttaccagtggctgaatctactttctcttatggatcgcttacacctgagacgaactacagaacagcacgtaccagaggtggaagtccaagtcaaacgcagaaggactgcctcactgagcaaccaagagtgtcagttgtacccgaggcgttctcagcagcagcaagtacctgtggtggatttccaggctgaactgaggcaggcattcttagctgagacaccaagaggtggttaaagccatattggagtagcgaggaatctgattccaagcaaaaaccaggctccatctactctttgaagcttctgcccagcttgcattgtttctaggagaacctgcgtcatacctttatctatagccttcccctaggtcttcagaagcatcaagttttaactgtggacattggatttggtggaacagcaatcatgactgttggcaagagtagcaagatgctgcagcacattgactatagaatgagatgtatcctgcaagatggccgaatcttcattggcacctttaaggcttttgacaagcatatgaatttgatcctctgtgattgtgatgagttcagaaagatcaagccaaagaatgcgaagcaaccagagcgtgaagaaaagcgggttttgggtctggtgttgctgcgtggggagaacttggtatccatgactgtggaggggccaccccccaaagatactggcattgctcgggtaccacttgctggagctgctggaggccctggggttggtagggcagctggtagaggagtaccagctggtgtgccaattccccaggcccctgctggattggcaggccctgtccgaggagttgggggaccatcccagcaggtaatgactccacagggaagaggcactgtagcagctgctgctgttgctgcgactgccagtattgctggagccccaacacagtacccaccaggacggggcactccgcccccacccgtcggcagagcaaccccacctccaggcattatggctcctccacctggtatgagaccacccatgggcccaccaattgggcttccccctgctcgagggacgccaataggcatgccgcctccgggaatgagaccccctccaccaggcattagaggtccacctcccccaggaatgcgtccaccaagaccttagcatactgttgatccatctcagtcactttttcccctgcaatgcgtcttgtgaaattgtgtagagtgtttgtgagctttttgttccctcattctgcattaataatagctaataataaatgcatagagcaattaaactgtg

SEQ ID NO: 133 - DNA, 1493 bp, homo sapiens
gcaggccttgcccggaccagcccctcctccactctcctctcccctgtgagctccacctgccccagttctcctggctttaacccctccttggccaaggccagggttgcctgcgggagccaggcgtccgctctccacacctttcacagatcctacccaggccaccaccccgaacccctccgaccctgcgttccatcccaccatcaacctccacgtgaatctgcacctctgccccagccccagccctcagagcaacctcagcccagcccagcccagctccagctccagctccagcccgggccccatcatggccaaggactttcaagatatccagcagctgagctcggaggaaaatgaccatcctttccatcaaggtgaggggccaggcactcgcaggctgaatcccaggagaggaaatccatttttgaaagggccacctcctgcccagcccctggcacagcgtctctgctccatggtctgcttcagtctgcttgccctgagcttcaacatcctgctgctggtggtcatctgtgtgactgggtcccaaagtgagggtcacagaggtgcacagctgcaagccgagctgcggagcctgaaggaagctttcagcaacttctcctcgagcaccctgacggaggtccaggcaatcagcacccacggaggcagcgtgggtgacaagatcacatccctaggagccaagctggagaaacagcagcaggacctgaaagcagatcacgatgccctgctcttccatctgaagcacttccccgtggacctgcgcttcgtggcctgccagatggagctcctccacagcaacggctcccaaaggacctgctgccccgtcaactgggtggagcaccaaggcagctgctactggttctctcactccgggaaggcctgggctgaggcggagaagtactgccagctggagaacgcacacctggtggtcatcaactcctgggaggagcagaaattcattgtacaacacacgaaccccttcaatacctggataggtctcacggacagtgatggctcttggaaatgggtggatggcacagactataggcacaactacaagaactgggctgtcactcagccagataattggcacgggcacgagctgggtggaagtgaagactgtgttgaagtccagccggatggccgctggaacgatgacttctgcctgcaggtgtaccgctgggtgtgtgagaaaaggcggaatgccaccggcgaggtggcctgaccccagcacacctctggctaacccataccccacacctgcccagctctggcttctctgttgaggattttgaggaaaggaagaaacactgagacaggggtatggggaagagctgagcaaagagagaaaggaggtagtttaagagtccctgaccctggaggactgagatcccacctccttctgtaattcattgtaattattataatcgtcagcctcttcaatggcgtaggaaagaagaaacaaatgcttgaatctc

SEQ ID NO: 134 - DNA, 1333 bp, homo sapiens
gcaggccttgcccggaccagcccctcctccactctcctctcccctgtgagctccacctgccccagttctcctggctttaacccctccttggccaaggccagggttgcctgcgggagccaggcgtccgctctccacacctttcacagccccagccctcagagcaacctcagcccagcccagcccagctccagctccagctccagcccgggccccatcatggccaaggactttcaagatatccagcagctgagctcggaggaaaatgaccatcctttccatcaagggccacctcctgcccagcccctggcacagcgtctctgctccatggtctgcttcagtctgcttgccctgagcttcaacatcctgctgctggtggtcatctgtgtgactgggtcccaaagtgcacagctgcaagccgagctgcggagcctgaaggaagctttcagcaacttctcctcgagcaccctgacggaggtccaggcaatcagcacccacggaggcagcgtgggtgacaagatcacatccctaggagccaagctggagaaacagcagcaggacctgaaagcagatcacgatgccctgctcttccatctgaagcacttccccgtggacctgcgcttcgtggcctgccagatggagctcctccacagcaacggctcccaaaggacctgctgccccgtcaactgggtggagcaccaaggcagctgctactggttctctcactccgggaaggcctgggctgaggcggagaagtactgccagctggagaacgcacacctggtggtcatcaactcctgggaggagcagaaattcattgtacaacacacgaaccccttcaatacctggataggtctcacggacagtgatggctcttggaaatgggtggatggcacagactataggcacaactacaagaactgggctgtcactcagccagataattggcacgggcacgagctgggtggaagtgaagactgtgttgaagtccagccggatggccgctggaacgatgacttctgcctgcaggtgtaccgctgggtgtgtgagaaaaggcggaatgccaccggcgaggtggcctgaccccagcacacctctggctaacccataccccacacctgcccagctctggcttctctgttgaggattttgaggaaaggaagaaacactgagacaggggtatggggaagagctgagcaaagagagaaaggaggtagtttaagagtccctgaccctggaggactgagatcccacctccttctgtaattcattgtaattattataatcgtcagcctcttcaatggcgtaggaaagaagaaacaaatgcttgaatctc

SEQ ID NO: 135 - DNA, 1202 bp, homo sapiens
ccccagccctcagagcaacctcagcccagcccagcccagctccagctccagctccagcccgggccccatcatggccaaggactttcaagatatccagcagctgagctcggaggaaaatgaccatcctttccatcaagggccacctcctgcccagcccctggcacagcgtctctgctccatggtctgcttcagtctgcttgccctgagcttcaacatcctgctgctggtggtcatctgtgtgactgggtcccaaagtgagggtcacagaggtgcacagctgcaagccgagctgcggagcctgaaggaagctttcagcaacttctcctcgagcaccctgacggaggtccaggcaatcagcacccacggaggcagcgtgggtgacaagatcacatccctaggagccaagctggagaaacagcagcaggacctgaaagcagatcacgatgccctgctcttccatctgaagcacttccccgtggacctgcgcttcgtggcctgccagatggagctcctccacagcaacggctcccaaaggacctgctgccccgtcaactgggtggagcaccaaggcagctgctactggttctctcactccgggaaggcctgggctgaggcggagaagtactgccagctggagaacgcacacctggtggtcatcaactcctgggaggagcagaaattcattgtacaacacacgaaccccttcaatacctggataggtctcacggacagtgatggctcttggaaatgggtggatggcacagactataggcacaactacaagaactgggctgtcactcagccagataattggcacgggcacgagctgggtggaagtgaagactgtgttgaagtccagccggatggccgctggaacgatgacttctgcctgcaggtgtaccgctgggtgtgtgagaaaaggcggaatgccaccggcgaggtggcctgaccccagcacacctctggctaacccataccccacacctgcccagctctggcttctctgttgaggattttgaggaaaggaagaaacactgagacaggggtatggggaagagctgagcaaagagagaaaggaggtagtttaagagtccctgaccctggaggactgagatcccacctccttctgtaattcattgtaattattataatcgtcagcctcttcaatggcgtaggaaagaagaaacaaatgcttgaatctc

SEQ ID NO: 136 - DNA, 1854 bp, homo sapiens
actgatgtcttgactcatgggtgtattcacaaattctgttacttcaagtctttttcttttaacggattgatcttttgctagatagagacaaaatatcagtgtgaattacagcaaacccctattccatgctgttatgggtgaaactctgggagattctcctattgacccagaaagcgattccttcactgatacactgtctgcaaacatatcacaagaaatgaccatggttgacacagagatgccattctggcccaccaactttgggatcagctccgtggatctctccgtaatggaagaccactcccactcctttgatatcaagcccttcactactgttgacttctccagcatttctactccacattacgaagacattccattcacaagaacagatccagtggttgcagattacaagtatgacctgaaacttcaagagtaccaaagtgcaatcaaagtggagcctgcatctccaccttattattctgagaagactcagctctacaataagcctcatgaagagccttccaactccctcatggcaattgaatgtcgtgtctgtggagataaagcttctggatttcactatggagttcatgcttgtgaaggatgcaagggtttcttccggagaacaatcagattgaagcttatctatgacagatgtgatcttaactgtcggatccacaaaaaaagtagaaataaatgtcagtactgtcggtttcagaaatgccttgcagtggggatgtctcataatgccatcaggtttgggcggatgccacaggccgagaaggagaagctgttggcggagatctccagtgatatcgaccagctgaatccagagtccgctgacctccgggccctggcaaaacatttgtatgactcatacataaagtccttcccgctgaccaaagcaaaggcgagggcgatcttgacaggaaagacaacagacaaatcaccattcgttatctatgacatgaattccttaatgatgggagaagataaaatcaagttcaaacacatcacccccctgcaggagcagagcaaagaggtggccatccgcatctttcagggctgccagtttcgctccgtggaggctgtgcaggagatcacagagtatgccaaaagcattcctggttttgtaaatcttgacttgaacgaccaagtaactctcctcaaatatggagtccacgagatcatttacacaatgctggcctccttgatgaataaagatggggttctcatatccgagggccaaggcttcatgacaagggagtttctaaagagcctgcgaaagccttttggtgactttatggagcccaagtttgagtttgctgtgaagttcaatgcactggaattagatgacagcgacttggcaatatttattgctgtcattattctcagtggagaccgcccaggtttgctgaatgtgaagcccattgaagacattcaagacaacctgctacaagccctggagctccagctgaagctgaaccaccctgagtcctcacagctgtttgccaagctgctccagaaaatgacagacctcagacagattgtcacggaacacgtgcagctactgcaggtgatcaagaagacggagacagacatgagtcttcacccgctcctgcaggagatctacaaggacttgtactagcagagagtcctgagccactgccaacatttcccttcttccagttgcactattctgagggaaaatctgacacctaagaaatttactgtgaaaaagcgttttaaaaagaaaaggatttagaatatgatctattttatgcatattgtttataaagacacatttacaatttacttttaatattaaaaattaccatattatgaaattgc

SEQ ID NO: 137 - DNA, 1767 bp, homo sapiens
ccagaagcctgcatttctgcattctgcttaattccctttccttagatttgaaagaagccaacactaaaccacaaatatacaacaaggccattttctcaaacgagagtcagcctttaacgaaatgaccatggttgacacagagatgccattctggcccaccaactttgggatcagctccgtggatctctccgtaatggaagaccactcccactcctttgatatcaagcccttcactactgttgacttctccagcatttctactccacattacgaagacattccattcacaagaacagatccagtggttgcagattacaagtatgacctgaaacttcaagagtaccaaagtgcaatcaaagtggagcctgcatctccaccttattattctgagaagactcagctctacaataagcctcatgaagagccttccaactccctcatggcaattgaatgtcgtgtctgtggagataaagcttctggatttcactatggagttcatgcttgtgaaggatgcaagggtttcttccggagaacaatcagattgaagcttatctatgacagatgtgatcttaactgtcggatccacaaaaaaagtagaaataaatgtcagtactgtcggtttcagaaatgccttgcagtggggatgtctcataatgccatcaggtttgggcggatgccacaggccgagaaggagaagctgttggcggagatctccagtgatatcgaccagctgaatccagagtccgctgacctccgggccctggcaaaacatttgtatgactcatacataaagtccttcccgctgaccaaagcaaaggcgagggcgatcttgacaggaaagacaacagacaaatcaccattcgttatctatgacatgaattccttaatgatgggagaagataaaatcaagttcaaacacatcacccccctgcaggagcagagcaaagaggtggccatccgcatctttcagggctgccagtttcgctccgtggaggctgtgcaggagatcacagagtatgccaaaagcattcctggttttgtaaatcttgacttgaacgaccaagtaactctcctcaaatatggagtccacgagatcatttacacaatgctggcctccttgatgaataaagatggggttctcatatccgagggccaaggcttcatgacaagggagtttctaaagagcctgcgaaagccttttggtgactttatggagcccaagtttgagtttgctgtgaagttcaatgcactggaattagatgacagcgacttggcaatatttattgctgtcattattctcagtggagaccgcccaggtttgctgaatgtgaagcccattgaagacattcaagacaacctgctacaagccctggagctccagctgaagctgaaccaccctgagtcctcacagctgtttgccaagctgctccagaaaatgacagacctcagacagattgtcacggaacacgtgcagctactgcaggtgatcaagaagacggagacagacatgagtcttcacccgctcctgcaggagatctacaaggacttgtactagcagagagtcctgagccactgccaacatttcccttcttccagttgcactattctgagggaaaatctgacacctaagaaatttactgtgaaaaagcattttaaaaagaaaaggttttagaatatgatctattttatgcatattgtttataaagacacatttacaatttacttttaatattaaaaattaccatattatgaaaaaaaaaaaaaaaa

SEQ ID NO: 138 - DNA, 1735 bp, Homo sapiens
cactcggagcccgagcccgagccgcagccgccgcctggggcgcttgggtcggcctcgaggacaccggagaggggcgccacgccgccgtggccgcagaaatgaccatggttgacacagagatgccattctggcccaccaactttgggatcagctccgtggatctctccgtaatggaagaccactcccactcctttgatatcaagcccttcactactgttgacttctccagcatttctactccacattacgaagacattccattcacaagaacagatccagtggttgcagattacaagtatgacctgaaacttcaagagtaccaaagtgcaatcaaagtggagcctgcatctccaccttattattctgagaagactcagctctacaataagcctcatgaagagccttccaactccctcatggcaattgaatgtcgtgtctgtggagataaagcttctggatttcactatggagttcatgcttgtgaaggatgcaagggtttcttccggagaacaatcagattgaagcttatctatgacagatgtgatcttaactgtcggatccacaaaaaaagtagaaataaatgtcagtactgtcggtttcagaaatgccttgcagtggggatgtctcataatgccatcaggtttgggcggatgccacaggccgagaaggagaagctgttggcggagatctccagtgatatcgaccagctgaatccagagtccgctgacctccgggccctggcaaaacatttgtatgactcatacataaagtccttcccgctgaccaaagcaaaggcgagggcgatcttgacaggaaagacaacagacaaatcaccattcgttatctatgacatgaattccttaatgatgggagaagataaaatcaagttcaaacacatcacccccctgcaggagcagagcaaagaggtggccatccgcatctttcagggctgccagtttcgctccgtggaggctgtgcaggagatcacagagtatgccaaaagcattcctggttttgtaaatcttgacttgaacgaccaagtaactctcctcaaatatggagtccacgagatcatttacacaatgctggcctccttgatgaataaagatggggttctcatatccgagggccaaggcttcatgacaagggagtttctaaagagcctgcgaaagccttttggtgactttatggagcccaagtttgagtttgctgtgaagttcaatgcactggaattagatgacagcgacttggcaatatttattgctgtcattattctcagtggagaccgcccaggtttgctgaatgtgaagcccattgaagacattcaagacaacctgctacaagccctggagctccagctgaagctgaaccaccctgagtcctcacagctgtttgccaagctgctccagaaaatgacagacctcagacagattgtcacggaacacgtgcagctactgcaggtgatcaagaagacggagacagacatgagtcttcacccgctcctgcaggagatctacaaggacttgtactagcagagagtcctgagccactgccaacatttcccttcttccagttgcactattctgagggaaaatctgacacctaagaaatttactgtgaaaaagcattttaaaaagaaaaggttttagaatatgatctattttatgcatattgtttataaagacacatttacaatttacttttaatattaaaaattaccatattatgaaattgc

SEQ ID NO: 139 - DNA, 1363 bp, homo sapiens
gaggaaaagctttcggactgctgaaggcccagcaggaagagaggctggatgagatcaacaagcaattcctagacgatcccaaatatagcagtgatgaggatctgccctccaaactggaaggcttcaaaggtgagggggaaactgtaggcggtggagacagggctgggggtaggagggttaggatttccacaagaacaaggcaggaacagcagagataaaaagtttacttttgtggtagcaaaaggggaacctgcctttattgccctcctgccacactgcggtccctttcccgggcctgcctctctcagcatcccctctagctccttacaccctagcggggcccctcaactccccaaccccacttcctctgcctgcccctcctcctccttccacgttgtctcctccacctagcagttggttggcaaccccttcctcactcacccagagaaatacatggagtttgaccttaatggaaatggcgatattggtgagaaacgggtgatttgcgggggcagggtggtgtgcaggcctaagaagacagaggtctctcctacatgctccattcctcatgatttgggagggggcccacctaccacagtgggaggaaggagaatggggatgcggaagtgggagaggagagagagggtctccccaccttctccccatccccatcctctgcccccagatatcatgtccctgaaacgaatgctggagaaacttggagtccccaagactcacctagagctaaagaaattaattggagaggtgtccagtggctccggggagacgttcagctaccctgactttctcaggatgatgctgggcaagagatctgccatcctaaaaatgtgagtgtcaatttccaacctcccctgtacttacctgttttctcctcccccatccctacccttgtccacaggctcaacatttctacacgttgcccatcatcccttcttccatccttagagggacccttccaaggtcccgaccccatccctatccatagtcctggtccccagaaactccaacccctgcccttcctcttcccccttccaccctcacatccccatccccttctagcctttcctagcaccctatgatttattcccttgagaggagtgttccctgatccctgtgcctcttcccatctcaaccaggatcctgatgtatgaggaaaaagcgagagaaaaggaaaagccaacaggccccccagccaagaaagctatctctgagttgccctgatttgaagggaaaagggatgatgggattgaaggggcttctaatgacccagatatggaaacagaagacaaaattgtaagccagagtcaacaaattaaataaattaccccctcctccagatcaa

SEQ ID NO: 140 - DNA, 639 bp, homo sapiens
gagagaaggagagcctgcagacagaggcctccagcttggtctgtctccccacctctaccagcatctgctgagctatgagccaaaccagggatttacagggaggaaaagctttcggactgctgaaggcccagcaggaagagaggctggatgagatcaacaagcaattcctagacgatcccaaatatagcagtgatgaggatctgccctccaaactggaaggcttcaaagagaaatacatggagtttgaccttaatggaaatggcgatattgatatcatgtccctgaaacgaatgctggagaaacttggagtccccaagactcacctagagctaaagaaattaattggagaggtgtccagtggctccggggagacgttcagctaccctgactttctcaggatgatgctgggcaagagatctgccatcctaaaaatgatcctgatgtatgaggaaaaagcgagagaaaaggaaaagccaacaggccccccagccaagaaagctatctctgagttgccctgatttgaagggaaaagggatgatgggattgaaggggcttctaatgacccagatatggaaacagaagacaaaattgtaagccagagtcaacaaattaaataaattaccccctcctccagatcaa

SEQ ID NO: 141 - DNA, 2075 bp, homo sapiens
cttcctccaggagtctctggtgcagctggggtggaatctggccaggccctgcttaggcccccatcctggggtcaggaaatttggaggataaggcccttcagccccaaggttgtcctcgaccagtcccgtgccatggcagcccacctgcttcccatctgcgccctcttcctgaccttactcgatatggcccaaggctttaggggccccttgctacccaaccggcccttcaccaccgtctggaatgcaaacacccagtggtgcctggagaggcacggtgtggacgtggatgtcagtgtcttcgatgtggtagccaacccagggcagaccttccgcggccctgacatgacaattttctatagctcccagctgggcacctacccctactacacgcccactggggagcctgtgtttggtggtctgccccagaatgccagcctgattgcccacctggcccgcacattccaggacatcctggctgccatacctgctcctgacttctcagggctggcagtcatcgactgggaggcatggcgcccacgctgggccttcaactgggacaccaaggacatttaccggcagcgctcacgggcactggtacaggcacagcaccctgattggccagctcctcaggtggaggcagtagcccaggaccagttccagggagctgcacgggcctggatggcaggcaccctccagctggggcgggcactgcgtcctcgcggcctctggggcttctatggcttccctgactgctacaactatgactttctaagccccaactacaccggccagtgcccatcaggcatccgtgcccaaaatgaccagctagggtggctgtggggccagagccgtgccctctatcccagcatctacatgcccgcagtgctggagggcacagggaagtcacagatgtatgtgcaacaccgtgtggccgaggcattccgtgtggctgtggctgctggtgaccccaatctgccggtgctgccctatgtccagatcttctatgacacgacaaaccactttctgcccctggatgagctggagcacagcctgggggagagtgcggcccagggggcagctggagtggtgctctgggtgagctgggaaaatacaagaaccaaggaatcatgtcaggccatcaaggagtatatggacactacactggggcccttcatcctgaacgtgaccagtggggcccttctctgcagtcaagccctgtgctccggccatggccgctgtgtccgccgcaccagccaccccaaagccctcctcctccttaaccctgccagtttctccatccagctcacgcctggtggtgggcccctgagcctgcggggtgccctctcacttgaagatcaggcacagatggctgtggagttcaaatgtcgatgctaccctggctggcaggcaccgtggtgtgagcggaagagcatgtggtgattggccacacactgagttgcacatattgagaacctaatgcactctgggtctggccagggcttcctcaaatacatgcacagtcatacaagtcatggtcacagtaaagagtacactcagccactgtcacaggcatattccctgcacacacatgcatacttacagactggaatagtggcataaggagttagaaccacagcagacaccattcattccatgtccatatgcatctacttggcaaggtcatagacaattcctccagagacactgagccagtctttgaactgcagcaatcacaaaggctgacattcactgagtgcctactctttgccaatccccgtgctaagcgttttatgtggacttattcattcctcacaatgaggctatgaggaaactgagtcactcacattgagagtaagcacgttgcccaaggttgcacagcaagaaaagggagaagttgagattcaaacccaggctgtctagctccgggggtacagcccttgcactcctactgagtttgtggtaaccagccctgcacgacccctgaatctgctgagaggcaccagtccagcaaataaagcagtcatgatttacttaaaaaaaaaaaaaaaaaaaaaaaaaaaaaaaaaaaaaaaaaa

SEQ ID NO: 142 - DNA, 2370 bp, homo sapiens
agatgtggggagcgcctctgccctgtcgccccgtccgggatgtgaggagcgtctctccctggccgccccgtctgagaagtgaggagcccctccgcccagcagccgccctgtctgagaagctagtcttgaattcctgacctcaggtgatcctcccgcgttggcctcccaaagtgctgggattacaggcatgagccaccactcctggccccagaaagtgacattctttacttaccacaggaggaaaagatccacgaaagtaaagtgcctagggcccatcaatgtcagatgcagccacgtggacaaagaacactccctgagcacaagacacgaaagaacccggtctccagtgtcacaaacaggcctgcccagcagggtctgcccctgcccacctcctccagcctaggttgtcctcgaccagtcccgtgccatggcagcccacctgcttcccatctgcgccctcttcctgaccttactcgatatggcccaaggctttaggggccccttgctacccaaccggcccttcaccaccgtctggaatgcaaacacccagtggtgcctggagaggcacggtgtggacgtggatgtcagtgtcttcgatgtggtagccaacccagggcagaccttccgcggccctgacatgacaattttctatagctcccagctgggcacctacccctactacacgcccactggggagcctgtgtttggtggtctgccccagaatgccagcctgattgcccacctggcccgcacattccaggacatcctggctgccatacctgctcctgacttctcagggctggcagtcatcgactgggaggcatggcgcccacgctgggccttcaactgggacaccaaggacatttaccggcagcgctcacgggcactggtacaggcacagcaccctgattggccagctcctcaggtggaggcagtagcccaggaccagttccagggagctgcacgggcctggatggcaggcaccctccagctggggcgggcactgcgtcctcgcggcctctggggcttctatggcttccctgactgctacaactatgactttctaagccccaactacaccggccagtgcccatcaggcatccgtgcccaaaatgaccagctagggtggctgtggggccagagccgtgccctctatcccagcatctacatgcccgcagtgctggagggcacagggaagtcacagatgtatgtgcaacaccgtgtggccgaggcattccgtgtggctgtggctgctggtgaccccaatctgccggtgctgccctatgtccagatcttctatgacacgacaaaccactttctgcccctggatgagctggagcacagcctgggggagagtgcggcccagggggcagctggagtggtgctctgggtgagctgggaaaatacaagaaccaaggaatcatgtcaggccatcaaggagtatatggacactacactggggcccttcatcctgaacgtgaccagtggggcccttctctgcagtcaagccctgtgctccggccatggccgctgtgtccgccgcaccagccaccccaaagccctcctcctccttaaccctgccagtttctccatccagctcacgcctggtggtgggcccctgagcctgcggggtgccctctcacttgaagatcaggcacagatggctgtggagttcaaatgtcgatgctaccctggctggcaggcaccgtggtgtgagcggaagagcatgtggtgattggccacacactgagttgcacatattgagaacctaatgcactctgggtctggccagggcttcctcaaatacatgcacagtcatacaagtcatggtcacagtaaagagtacactcagccactgtcacaggcatattccctgcacacacatgcatacttacagactggaatagtggcataaggagttagaaccacagcagacaccattcattccatgtccatatgcatctacttggcaaggtcatagacaattcctccagagacactgagccagtctttgaactgcagcaatcacaaaggctgacattcactgagtgcctactctttgccaatccccgtgctaagcgttttatgtggacttattcattcctcacaatgaggctatgaggaaactgagtcactcacattgagagtaagcacgttgcccaaggttgcacagcaagaaaagggagaagttgagattcaaacccaggctgtctagctccgggggtacagcccttgcactcctactgagtttgtggtaaccagccctgcacgacccctgaatctgctgagaggcaccagtccagcaaataaagcagtcatgatttacttaaaaaaaaaaaaaaaaaaaaaaaaaaaaaaaaaaaaaaaaaa

SEQ ID NO: 143 - DNA, 1985 bp, homo sapiens
cttcctccaggagtctctggtgcagctggggtggaatctggccaggccctgcttaggcccccatcctggggtcaggaaatttggaggataaggcccttcagccccaaggttgtcctcgaccagtcccgtgccatggcagcccacctgcttcccatctgcgccctcttcctgaccttactcgatatggcccaaggctttaggggccccttgctacccaaccggcccttcaccaccgtctggaatgcaaacacccagtggtgcctggagaggcacggtgtggacgtggatgtcagtgtcttcgatgtggtagccaacccagggcagaccttccgcggccctgacatgacaattttctatagctcccagctgggcacctacccctactacacgcccactggggagcctgtgtttggtggtctgccccagaatgccagcctgattgcccacctggcccgcacattccaggacatcctggctgccatacctgctcctgacttctcagggctggcagtcatcgactgggaggcatggcgcccacgctgggccttcaactgggacaccaaggacatttaccggcagcgctcacgggcactggtacaggcacagcaccctgattggccagctcctcaggtggaggcagtagcccaggaccagttccagggagctgcacgggcctggatggcaggcaccctccagctggggcgggcactgcgtcctcgcggcctctggggcttctatggcttccctgactgctacaactatgactttctaagccccaactacaccggccagtgcccatcaggcatccgtgcccaaaatgaccagctagggtggctgtggggccagagccgtgccctctatcccagcatctacatgcccgcagtgctggagggcacagggaagtcacagatgtatgtgcaacaccgtgtggccgaggcattccgtgtggctgtggctgctggtgaccccaatctgccggtgctgccctatgtccagatcttctatgacacgacaaaccactttctgcccctggaatcatgtcaggccatcaaggagtatatggacactacactggggcccttcatcctgaacgtgaccagtggggcccttctctgcagtcaagccctgtgctccggccatggccgctgtgtccgccgcaccagccaccccaaagccctcctcctccttaaccctgccagtttctccatccagctcacgcctggtggtgggcccctgagcctgcggggtgccctctcacttgaagatcaggcacagatggctgtggagttcaaatgtcgatgctaccctggctggcaggcaccgtggtgtgagcggaagagcatgtggtgattggccacacactgagttgcacatattgagaacctaatgcactctgggtctggccagggcttcctcaaatacatgcacagtcatacaagtcatggtcacagtaaagagtacactcagccactgtcacaggcatattccctgcacacacatgcatacttacagactggaatagtggcataaggagttagaaccacagcagacaccattcattccatgtccatatgcatctacttggcaaggtcatagacaattcctccagagacactgagccagtctttgaactgcagcaatcacaaaggctgacattcactgagtgcctactctttgccaatccccgtgctaagcgttttatgtggacttattcattcctcacaatgaggctatgaggaaactgagtcactcacattgagagtaagcacgttgcccaaggttgcacagcaagaaaagggagaagttgagattcaaacccaggctgtctagctccgggggtacagcccttgcactcctactgagtttgtggtaaccagccctgcacgacccctgaatctgctgagaggcaccagtccagcaaataaagcagtcatgatttacttaaaaaaaaaaaaaaaaaaaaaaaaaaaaaaaaaaaaaaaaaa

SEQ ID NO: 144 - DNA, 1718 bp, homo sapiens
cttcctccaggagtctctggtgcagctggggtggaatctggccaggccctgcttaggcccccatcctggggtcaggaaatttggaggataaggcccttcagccccaaggacatcctggctgccatacctgctcctgacttctcagggctggcagtcatcgactgggaggcatggcgcccacgctgggccttcaactgggacaccaaggacatttaccggcagcgctcacgggcactggtacaggcacagcaccctgattggccagctcctcaggtggaggcagtagcccaggaccagttccagggagctgcacgggcctggatggcaggcaccctccagctggggcgggcactgcgtcctcgcggcctctggggcttctatggcttccctgactgctacaactatgactttctaagccccaactacaccggccagtgcccatcaggcatccgtgcccaaaatgaccagctagggtggctgtggggccagagccgtgccctctatcccagcatctacatgcccgcagtgctggagggcacagggaagtcacagatgtatgtgcaacaccgtgtggccgaggcattccgtgtggctgtggctgctggtgaccccaatctgccggtgctgccctatgtccagatcttctatgacacgacaaaccactttctgcccctggatgagctggagcacagcctgggggagagtgcggcccagggggcagctggagtggtgctctgggtgagctgggaaaatacaagaaccaaggaatcatgtcaggccatcaaggagtatatggacactacactggggcccttcatcctgaacgtgaccagtggggcccttctctgcagtcaagccctgtgctccggccatggccgctgtgtccgccgcaccagccaccccaaagccctcctcctccttaaccctgccagtttctccatccagctcacgcctggtggtgggcccctgagcctgcggggtgccctctcacttgaagatcaggcacagatggctgtggagttcaaatgtcgatgctaccctggctggcaggcaccgtggtgtgagcggaagagcatgtggtgattggccacacactgagttgcacatattgagaacctaatgcactctgggtctggccagggcttcctcaaatacatgcacagtcatacaagtcatggtcacagtaaagagtacactcagccactgtcacaggcatattccctgcacacacatgcatacttacagactggaatagtggcataaggagttagaaccacagcagacaccattcattccatgtccatatgcatctacttggcaaggtcatagacaattcctccagagacactgagccagtctttgaactgcagcaatcacaaaggctgacattcactgagtgcctactctttgccaatccccgtgctaagcgttttatgtggacttattcattcctcacaatgaggctatgaggaaactgagtcactcacattgagagtaagcacgttgcccaaggttgcacagcaagaaaagggagaagttgagattcaaacccaggctgtctagctccgggggtacagcccttgcactcctactgagtttgtggtaaccagccctgcacgacccctgaatctgctgagaggcaccagtccagcaaataaagcagtcatgatttacttaaaaaaaaaaaaaaaaaaaaaaaaaaaaaaaaaaaaaaaaaa

SEQ ID NO: 145 - DNA, 1738 bp, homo sapiens
cttcctccaggagtctctggtgcagctggggtggaatctggccaggccctgcttaggcccccatcctggggtcaggaaatttggaggataaggcccttcagccccaaggttgtcctcgaccagtcccgtgccatggcagcccacctgcttcccatctgcgccctcttcctgaccttactcgatatggcccaaggctttaggggccccttgctacccaaccggcccttcaccaccgtctggaatgcaaacacccagtggtgcctggagaggcacggtgtggacgtggatgtcagtgtcttcgatgtggtagccaacccagggcagaccttccgcggccctgacatgacaattttctatagctcccagctgggcacctacccctactacacgcccactggggagcctgtgtttggtggtctgccccagaatgccagcctgattgcccacctggcccgcacattccaggacatcctggctgccatacctgctcctgacttctcagggctggcagtcatcgactgggaggcatggcgcccacgctgggccttcaactgggacaccaaggacatttaccggcagcgctcacgggcactggtacaggcacagcaccctgattggccagctcctcaggtggaggcagtagcccaggaccagttccagggagctgcacgggcctggatggcaggcaccctccagctggggcgggcactgcgtcctcgcggcctctggggcttctatggcttccctgactgctctgggtgagctgggaaaatacaagaaccaaggaatcatgtcaggccatcaaggagtatatggacactacactggggcccttcatcctgaacgtgaccagtggggcccttctctgcagtcaagccctgtgctccggccatggccgctgtgtccgccgcaccagccaccccaaagccctcctcctccttaaccctgccagtttctccatccagctcacgcctggtggtgggcccctgagcctgcggggtgccctctcacttgaagatcaggcacagatggctgtggagttcaaatgtcgatgctaccctggctggcaggcaccgtggtgtgagcggaagagcatgtggtgattggccacacactgagttgcacatattgagaacctaatgcactctgggtctggccagggcttcctcaaatacatgcacagtcatacaagtcatggtcacagtaaagagtacactcagccactgtcacaggcatattccctgcacacacatgcatacttacagactggaatagtggcataaggagttagaaccacagcagacaccattcattccatgtccatatgcatctacttggcaaggtcatagacaattcctccagagacactgagccagtctttgaactgcagcaatcacaaaggctgacattcactgagtgcctactctttgccaatccccgtgctaagcgttttatgtggacttattcattcctcacaatgaggctatgaggaaactgagtcactcacattgagagtaagcacgttgcccaaggttgcacagcaagaaaagggagaagttgagattcaaacccaggctgtctagctccgggggtacagcccttgcactcctactgagtttgtggtaaccagccctgcacgacccctgaatctgctgagaggcaccagtccagcaaataaagcagtcatgatttacttaaaaaaaaaaaaaaaaaaaaaaaaaaaaaaaaaaaaaaaaaa

SEQ ID NO: 146 - DNA, 1300 bp, homo sapiens
cttcctccaggagtctctggtgcagctggggtggaatctggccaggccctgcttaggcccccatcctggggtcaggaaatttggaggataaggcccttcagccccaagtgctggagggcacagggaagtcacagatgtatgtgcaacaccgtgtggccgaggcattccgtgtggctgtggctgctggtgaccccaatctgccggtgctgccctatgtccagatcttctatgacacgacaaaccactttctgcccctggatgagctggagcacagcctgggggagagtgcggcccagggggcagctggagtggtgctctgggtgagctgggaaaatacaagaaccaaggaatcatgtcaggccatcaaggagtatatggacactacactggggcccttcatcctgaacgtgaccagtggggcccttctctgcagtcaagccctgtgctccggccatggccgctgtgtccgccgcaccagccaccccaaagccctcctcctccttaaccctgccagtttctccatccagctcacgcctggtggtgggcccctgagcctgcggggtgccctctcacttgaagatcaggcacagatggctgtggagttcaaatgtcgatgctaccctggctggcaggcaccgtggtgtgagcggaagagcatgtggtgattggccacacactgagttgcacatattgagaacctaatgcactctgggtctggccagggcttcctcaaatacatgcacagtcatacaagtcatggtcacagtaaagagtacactcagccactgtcacaggcatattccctgcacacacatgcatacttacagactggaatagtggcataaggagttagaaccacagcagacaccattcattccatgtccatatgcatctacttggcaaggtcatagacaattcctccagagacactgagccagtctttgaactgcagcaatcacaaaggctgacattcactgagtgcctactctttgccaatccccgtgctaagcgttttatgtggacttattcattcctcacaatgaggctatgaggaaactgagtcactcacattgagagtaagcacgttgcccaaggttgcacagcaagaaaagggagaagttgagattcaaacccaggctgtctagctccgggggtacagcccttgcactcctactgagtttgtggtaaccagccctgcacgacccctgaatctgctgagaggcaccagtccagcaaataaagcagtcatgatttacttaaaaaaaaaaaaaaaaaaaaaaaaaaaaaaaaaaaaaaaaaa

SEQ ID NO: 147 - DNA, 1151 bp, homo sapiens
cttcctccaggagtctctggtgcagctggggtggaatctggccaggccctgcttaggcccccatcctggggtcaggaaatttggaggataaggcccttcagccccaaggatgagctggagcacagcctgggggagagtgcggcccagggggcagctggagtggtgctctgggtgagctgggaaaatacaagaaccaaggaatcatgtcaggccatcaaggagtatatggacactacactggggcccttcatcctgaacgtgaccagtggggcccttctctgcagtcaagccctgtgctccggccatggccgctgtgtccgccgcaccagccaccccaaagccctcctcctccttaaccctgccagtttctccatccagctcacgcctggtggtgggcccctgagcctgcggggtgccctctcacttgaagatcaggcacagatggctgtggagttcaaatgtcgatgctaccctggctggcaggcaccgtggtgtgagcggaagagcatgtggtgattggccacacactgagttgcacatattgagaacctaatgcactctgggtctggccagggcttcctcaaatacatgcacagtcatacaagtcatggtcacagtaaagagtacactcagccactgtcacaggcatattccctgcacacacatgcatacttacagactggaatagtggcataaggagttagaaccacagcagacaccattcattccatgtccatatgcatctacttggcaaggtcatagacaattcctccagagacactgagccagtctttgaactgcagcaatcacaaaggctgacattcactgagtgcctactctttgccaatccccgtgctaagcgttttatgtggacttattcattcctcacaatgaggctatgaggaaactgagtcactcacattgagagtaagcacgttgcccaaggttgcacagcaagaaaagggagaagttgagattcaaacccaggctgtctagctccgggggtacagcccttgcactcctactgagtttgtggtaaccagccctgcacgacccctgaatctgctgagaggcaccagtccagcaaataaagcagtcatgatttacttaaaaaaaaaaaaaaaaaaaaaaaaaaaaaaaaaaaaaaaaaa

SEQ ID NO: 148 - DNA, 1373 bp, homo sapiens
gggaggagagaaaagccatggccgacaaggtcctgaaggagaagagaaagctgtttatccgttccatgggtgaaggtacaataaatggcttactggatgaattattacagacaagggtgctgaacaaggaagagatggagaaagtaaaacgtgaaaatgctacagttatggataagacccgagctttgattgactccgttattccgaaaggggcacaggcatgccaaatttgcatcacatacatttgtgaagaagacagttacctggcagggacgctgggactctcagcagatcaaacatctggaaattaccttaatatgcaagactctcaaggagtactttcttcctttccagctcctcaggcagtgcaggacaacccagctatgcccacatcctcaggctcagaagggaatgtcaagctttgctccctagaagaagctcaaaggatatggaaacaaaagtcggcagagatttatccaataatggacaagtcaagccgcacacgtcttgctctcattatctgcaatgaagaatttgacagtattcctagaagaactggagctgaggttgacatcacaggcatgacaatgctgctacaaaatctggggtacagcgtagatgtgaaaaaaaatctcactgcttcggacatgactacagagctggaggcatttgcacaccgcccagagcacaagacctctgacagcacgttcctggtgttcatgtctcatggtattcgggaaggcatttgtgggaagaaacactctgagcaagtcccagatatactacaactcaatgcaatctttaacatgttgaataccaagaactgcccaagtttgaaggacaaaccgaaggtgatcatcatccaggcctgccgtggtgacagccctggtgtggtgtggtttaaagattcagtaggagtttctggaaacctatctttaccaactacagaagagtttgaggatgatgctattaagaaagcccacatagagaaggattttatcgctttctgctcttccacaccagataatgtttcttggagacatcccacaatgggctctgtttttattggaagactcattgaacatatgcaagaatatgcctgttcctgtgatgtggaggaaattttccgcaaggttcgattttcatttgagcagccagatggtagagcgcagatgcccaccactgaaagagtgactttgacaagatgtttctacctcttcccaggacattaaaataaggaaactgtatgaatgtctgtgggcaggaagtgaagagatcgttctgtaaaaggtttttggaattatgtctgctgaataataaactttttttgaaataataaatctggtagaaaaatgaaaaaaaaaaaaaaaaaa

SEQ ID NO: 149 - DNA, 1094 bp, homo sapiens
gggaggagagaaaagccatggccgacaaggtcctgaaggagaagagaaagctgtttatccgttccatgggtgaagctcctcaggcagtgcaggacaacccagctatgcccacatcctcaggctcagaagggaatgtcaagctttgctccctagaagaagctcaaaggatatggaaacaaaagtcggcagagatttatccaataatggacaagtcaagccgcacacgtcttgctctcattatctgcaatgaagaatttgacagtattcctagaagaactggagctgaggttgacatcacaggcatgacaatgctgctacaaaatctggggtacagcgtagatgtgaaaaaaaatctcactgcttcggacatgactacagagctggaggcatttgcacaccgcccagagcacaagacctctgacagcacgttcctggtgttcatgtctcatggtattcgggaaggcatttgtgggaagaaacactctgagcaagtcccagatatactacaactcaatgcaatctttaacatgttgaataccaagaactgcccaagtttgaaggacaaaccgaaggtgatcatcatccaggcctgccgtggtgacagccctggtgtggtgtggtttaaagattcagtaggagtttctggaaacctatctttaccaactacagaagagtttgaggatgatgctattaagaaagcccacatagagaaggattttatcgctttctgctcttccacaccagataatgtttcttggagacatcccacaatgggctctgtttttattggaagactcattgaacatatgcaagaatatgcctgttcctgtgatgtggaggaaattttccgcaaggttcgattttcatttgagcagccagatggtagagcgcagatgcccaccactgaaagagtgactttgacaagatgtttctacctcttcccaggacattaaaataaggaaactgtatgaatgtctgtgggcaggaagtgaagagatcgttctgtaaaaggtttttggaattatgtctgctgaataataaactttttttgaaataataaatctggtagaaaaatgaaaaaaaaaaaaaaaaaa

SEQ ID NO: 150 - DNA, 950 bp, homo sapiens
gggaggagagaaaagccatggccgacaaggtcctgaaggagaagagaaagctgtttatccgttccatgggtgaagctcctcaggcagtgcaggacaacccagctatgcccacatcctcaggctcagaagggaatgtcaagctttgctccctagaagaagctcaaaggatatggaaacaaaagtcggcagagatttatccaataatggacaagtcaagccgcacacgtcttgctctcattatctgcaatgaagaatttgacagtattcctagaagaactggagctgaggttgacatcacaggcatgacaatgctgctacaaaatctggggtacagcgtagatgtgaaaaaaaatctcactgcttcggacatgactacagagctggaggcatttgcacaccgcccagagcacaagacctctgacagcacgttcctggtgttcatgtctcatggtattcgggaaggcatttgtgggaagaaacactctgagcaagtcccagatatactacaactcaatgcaatctttaacatgttgaataccaagaactgcccaagtttgaaggacaaaccgaaggtgatcatcatccaggcctgccgtggtgataatgtttcttggagacatcccacaatgggctctgtttttattggaagactcattgaacatatgcaagaatatgcctgttcctgtgatgtggaggaaattttccgcaaggttcgattttcatttgagcagccagatggtagagcgcagatgcccaccactgaaagagtgactttgacaagatgtttctacctcttcccaggacattaaaataaggaaactgtatgaatgtctgtgggcaggaagtgaagagatcgttctgtaaaaggtttttggaattatgtctgctgaataataaactttttttgaaataataaatctggtagaaaaatgaaaaaaaaaaaaaaaaaa

SEQ ID NO: 151 - DNA, 2478 bp, homo sapiens
ctggagataccggggctgaagcatatggagtcacccagcccggtgtccatgtccttggataggccattgcttttagagctggagatgggtgcacaggctgatgtggctagggatggccactttcctgggactttgatggtagatgtccgaaggtcaatctcttttttatgaatattcttcatataatcacctaagcttgaataataggtgagcacgccatcggaacacagggtgacgtatttctttttccatgtcttcagccattttccacttcgctttaagagcatgccctgtttaatggggatggctctgccgctcccgatggtgtcagcatgattctccggggctttcctctctttgtctgggtcactccctttctcagatgtaaacaggttggaccagcgcatggaccgcttgcaaacgggggtgggtgtgttggcagtgggaggaacactgaactgagggtcctcctggctggtgctgggagtcggtggaatggaggaggaatagttatttaaactcccacctccatttcttttcttcataatgtgcacggtggaaaccgcaaatgagtgtaactgttcatcaggtatgctcaaagatctatctgcatctctttgtgtgatatgatgaggtatctccaaggtcacagatattattgtcattgtaagataatgctggatggctgtgctgtcatcaaggaatattgtcgaacacgagctgtattgttgactgaaacgctcagtagatacatggtttgtacagttgcttcttcttatttctacaacatctgtttgagagttcctctggaatattgtgcttgcctctggattggcagaagagttaaactccaaagcatctgtttgagagttcctctggaatattgtgcttgcctctggattggcagaaaggttaaactccaaagcttcaggcatctcccggtcacgaacctggtgcatgtggaggtcctcaccaacttcaacagtcacctcagcaggctgtacagcagcagccatgggcgctcctgccatcctgtcctcagcttcaggcaccaccactgacctgggacagtgaatcgacaatgccgtcttctgtctcgtggggcatcctcctgctggcaggcctgtgctgcctggtccctgtctccctggctgaggatccccagggagatgctgcccagaagacagatacatcccaccatgatcaggatcacccaaccttcaacaagatcacccccaacctggctgagttcgccttcagcctataccgccagctggcacaccagtccaacagcaccaatatcttcttctccccagtgagcatcgctacagcctttgcaatgctctccctggggaccaaggctgacactcacgatgaaatcctggagggcctgaatttcaacctcacggagattccggaggctcagatccatgaaggcttccaggaactcctccgtaccctcaaccagccagacagccagctccagctgaccaccggcaatggcctgttcctcagcgagggcctgaagctagtggataagtttttggaggatgttaaaaagttgtaccactcagaagccttcactgtcaacttcggggacaccgaagaggccaagaaacagatcaacgattacgtggagaagggtactcaagggaaaattgtggatttggtcaaggagcttgacagagacacagtttttgctctggtgaattacatcttctttaaaggcaaatgggagagaccctttgaagtcaaggacaccgaggaagaggacttccacgtggaccaggtgaccaccgtgaaggtgcctatgatgaagcgtttaggcatgtttaacatccagcactgtaagaagctgtccagctgggtgctgctgatgaaatacctgggcaatgccaccgccatcttcttcctgcctgatgaggggaaactacagcacctggaaaatgaactcacccacgatatcatcaccaagttcctggaaaatgaagacagaaggtctgccagcttacatttacccaaactgtccattactggaacctatgatctgaagagcgtcctgggtcaactgggcatcactaaggtcttcagcaatggggctgacctctccggggtcacagaggaggcacccctgaagctctccaaggccgtgcataaggctgtgctgaccatcgacgagaaagggactgaagctgctggggccatgtttttagaggccatacccatgtctatcccccccgaggtcaagttcaacaaaccctttgtcttcttaatgattgaacaaaataccaagtctcccctcttcatgggaaaagtggtgaatcccacccaaaaataactgcctctcgctcctcaacccctcccctccatccctggccccctccctggatgacattaaagaagggttgagctggaaaaaaaaaaaaaaaaaaaaaaaaaaaaaaaaaaaaaaaaaaaaaaaaaaaaaaaaaaaaaaaa

SEQ ID NO: 152 - DNA, 1564 bp, homo sapiens
gttttagcatactccctggcagagagaagtcagtcaataaatgtttgctaaataaagaatgatgtgatgtattaatggtattaatattaaagaaggtatatatcatcatacacatatgctcataaaataatgactcaaacttccaattctgtatgcagaagctaatcacctccattgttttttacttaaaaaagggagacatttttagtcttcacaataatcatgtatagattggggatgaaataatttaagtttcctactatatataaagccactgagcagtaacttttttatttcataaaaatcataatttttttaatcattaagtatccctttgtatccaccaccttttagaaagtctatttacctacacacctatcctctgagaattgtatgtcctgtatcattccccttccataaaaattgggcctgaaagccatgttttatgaacctttggcttcatcggccacagttgattagaccagaaagagatacctgcctcagactcaattttctcccagaggttcagaatgaaatcacagaaccatgagcgaatatatgaatttaagagttagaagacatgtccatccacgtgcagtggtgaaagacaacatgcaaagtaagaaaaatgaagtggaaaagcaggaagactcagagaaatcatgctaccccagggtagtaagaaaatagctgcatggggctgggcacggtggcctgtaatcccagcaagttggaaggacgaggcaggaggatcacttgaggccaggagttcgaggccagcctggacaacacggtgaaaccccatctctactaaaaatacaaaaatgagccagccatggtggcatgtgcctgtaatcccagctactcaggaggctgaggcaggagaatcacctgaacccgggaagcggaggatgctgtgagctgagatagcaccactgcactccagcctgggcgacagagtaagacgctgtctcaaaataaagaaagaaaaaaagaaaatagctgcctgggttataaatttccagttcctggtttcccttccccttcatgagtcttggctgtacttctatcatcgggtactgtgaaaactccagcatctttgcctaatgggaactaatttccctttttgggtaagccagcttacattttttaaattgtccattactggaacctatgatctgaagagcgtcctgggtcaactgggcatcactaaggtcttcagcaatggggctgacctctccggggtcacagaggaggcacccctgaagctctccaaggccgtgcataaggctgtgctgaccatcgacgagaaagggactgaagctgctggggccatgtttttagaggccatacccatgtctatcccccccgaggtcaagttcaacaaaccctttgtcttcttaatgattgaacaaaataccaagtctcccctcttcatgggaaaagtggtgaatcccacccaaaaataactgcctctcgctcctcaacccctcccctccatccctggccccctccctggatgacattaaagaagggttgagctggaaaaaaaaaaaaaaaaaaa

SEQ ID NO: 153 - DNA, 3862 bp, homo sapiens
ctcctttttctcttttggttaaaagagagcattgtcgttctcagccatgtgctctgtataattaagagctgacactgaagcagagtaacaacatcttctaatttttttacccctgatcacaggtgcaaacatctcaagccagttcagatgttgctgtttcctcaagttgcaggtctatggaaatgcaggatctaaccagcccgcatagccgtctgagtggtagtagtgaatcccccagtggccccaaactcggtaactctcatataaatagtaattccatgactcccaatggcaccgaagttaaaacagagccaatgagcagcagtgaaacagcttcaacgacagccgacgggtctttaaacaatttctcaggttcagcaattgggagcagtagtttcagcccacgaccaactcaccagttctctccaccacagatttacccttccaacagaccatacccacatattctccctaccccttcctcacaaactatggctgcatatgggcaaacacagtttaccacaggaatgcaacaagctacagcctatgccacgtacccacagccaggacagccgtacggcatttcctcatatggtgcattgtgggcaggcatcaagactgaaggtggattgtcacagtctcagtcacctggacagacaggatttctcagctatggcacaagcttcagtacccctcaacctggacaggcaccatacagctaccagatgcaaggtagcagttttacaacatcatcaggaatatatacaggaaataattcactcacaaattcctctggatttaatagttcacagcaggactatccgtcttatcccagttttggccagggtcagtacgcacagtattataacagctcaccgtatccagcacattatatgaccagcagcaacaccagcccaacgacaccatccaccaatgccacttaccagcttcaagaaccgccatctggcatcaccagccaagcagttacagatcccacagcagagtacagcacaatccacagcccatcaacacccattaaagattcagattctgatcgattgcgtcgaggttcagatgggaaatcacgtggacggggccgaagaaacaataatccttcacctcccccagattctgatcttgagagagtgttcatctgggacttggatgagacaatcattgttttccactccttgcttactgggtcctacgccaacagatatgggagggatccacccacttcagtttcccttggactgcgaatggaagaaatgattttcaacttggcagacacacatttattttttaatgacttagaagaatgtgaccaagtccatatagatgatgtttcttcagatgataacggacaggacctaagcacatataactttggaacagatggctttcctgctgcagcaaccagtgctaacttatgtttggcaactggtgtacggggcggtgtggactggatgagaaagttggccttccgctacagacgggtaaaagagatctacaacacctacaaaaataatgttggaggtctgcttggtccagctaagagggaagcctggctgcagttgagggccgaaattgaagccctgaccgactcctggttgacactggccctgaaagcactctcgctcattcactcccggacaaactgtgtgaatattttagtaacaactactcagctcatcccagcattggcgaaagtcctgctgtatgggttaggaattgtatttccaatagaaaatatttacagtgcaactaaaataggaaaagaaagctgttttgagagaataattcaaaggtttggaagaaaagtggtgtatgttgttataggagatggtgtagaagaagaacaaggagcaaaaaagcacgcgatgcccttctggaggatctccagccactcggacctcatggccctgcaccatgccttggaactggagtacctgtaacagcgctcggcactttgacagcgcacagctgctctgtgaccagggacagatccagcaggccccagtctcgcatcagcgccggcctccagaacttagcaatttccgcctggtgatgcgcagttgctgtcagtcttgacctctgcctttgtggtgaatggaggaccacgtctatttcatcagaacagctgttgactctagtactgtgaatccagtgaaaataagccatgagaatgttttagcacagcgttatgtgtctgccacattaactacacggttcaaacctgtgaagaaaggacctgcaaacgcttcagttgttagcattttcaatgtgatataaacagcttctccaatacagcaaacctaattgcacaacagagactgaaatgtgtttcctgaataccagtggaggaattttcttgtaaagaaggtttactttttggtgtctcatacccagggtaatctgtacatctctacttatttatgaacagactttttttaaaaagataaaaaaacagctttattgaggtataattcacccaccagacttttttaaacatcaaataattgaagagacaatagcattagaaataagtgattaaaggcctctgcctcacaacatggcaagtacagtactttgaattttagcacattgcatagtagttttaagtatgtctaatttaaacgtataatatgtacatcactgagacaatcatgtacagaaagaatttttggtgtaaatttgtaataatggataattcttttacatattgtttagggaaatgatattgaaaggtagcaatgcctggatagtgaagcatgaggcagcacgtgcacaaattcatgtgccgtgccttatctgagttttcggtataaatatgtagataatggattttttttttttagataatgttgtcaagaccaaaagcatggatgtcaagtgtcagtaaggattttgttttctaaaattttttcctgcatcagttcttctgagggccttgatgaaataacacagcagtttcttaaacaatttgaaacaaaatgagctctcctaccacctcactttttcatttccacactaatgtattatatgtaactacttggaaaaaataattattcaaatgcttcttcccacaaagaatatagatgatagtagatatattttattaataaaatggttcatgaatcggagactaacaaagttttcatgtgctcagaattattaattatcgtgtctgcattttctttcgataaaggaagacacacgatgctaatccggaaatcagcaaactttgcattactccctatgtgcgtattttctctttcttcctgtcaccctgaggaaggttcattgccattgtcatcaccatggaaacaacgttcctctccacctgcattatgtactacatgacaggcatcaatctggggaaataataaaattatcacctttgtcagaccataagagtttctccaaaagtggtcagtttggctgggcaatattttctctcatctaacaaacacaatccattgtcatgaaattacccttaggatgagtcttctttaatcaatcatatattgggcggaaaaaacaccagctttgacccgaagtagttgaagagctacttcattcttttctgaagttgtgtgttgctgctagaaatagtcatttgtgaattatccaaattgtttaaattcacaattgaattagttttttcttcctttttgcttgaagcaaacagttgacaatttttaaccttttcattttatgtttttgtactctgcagactgaaaagacaaagtttatcttggccttactgtataaaggtgtgctgtgtccaccgttgtgtacagaatttttcttcattaattttgtgtttaagttaataaaatttatttgtgatgtactgtaa

SEQ ID NO: 154 - DNA, 4326 bp, homo sapiens
aaaccaataaggttaggacaagagaatagctgtggtttgcgttgcaaaaaccaaaaaaaaaaaaaaaaaaaaaaaaagaaagccccgaggctccatgggcagacctacaaggctgcgcaaacaaatcgagggatgagattctgctgtttctttgtctagggttctcagatgctatctgccgctgctgtttggtggggaaggagcgctgggcgcaaagctgttaccaaacagaacggtgggagctgatggctccgagtttggggcgaggtagaaactctccagtgccacttccgactttaagccttcctgttgccgtccactgtggcgggtttcttcctggggaacacgttttcgctcagtcgctcggcagcccgagcctgcggcagcggccaggcgcctgccccctgcgccgagctttcccctgcagaggcgctccactcccagaagcgccgcggctgcaccagagcgcctgagagcccccgcgcgtacccatccaggagcaaaactatgtcaggaatggaggtttgctaacccagaaaattcgaaggaacacattaaactggtggatgcagcagatgtaagcgctgtgcaaacatctcaagccagttcagatgttgctgtttcctcaagttgcaggtctatggaaatgcaggatctaaccagcccgcatagccgtctgagtggtagtagtgaatcccccagtggccccaaactcggtaactctcatataaatagtaattccatgactcccaatggcaccgaagttaaaacagagccaatgagcagcagtgaaacagcttcaacgacagccgacgggtctttaaacaatttctcaggttcagcaattgggagcagtagtttcagcccacgaccaactcaccagttctctccaccacagatttacccttccaacagaccatacccacatattctccctaccccttcctcacaaactatggctgcatatgggcaaacacagtttaccacaggaatgcaacaagctacagcctatgccacgtacccacagccaggacagccgtacggcatttcctcatatggtgcattgtgggcaggcatcaagactgaaggtggattgtcacagtctcagtcacctggacagacaggatttctcagctatggcacaagcttcagtacccctcaacctggacaggcaccatacagctaccagatgcaaggtagcagttttacaacatcatcaggaatatatacaggaaataattcactcacaaattcctctggatttaatagttcacagcaggactatccgtcttatcccagttttggccagggtcagtacgcacagtattataacagctcaccgtatccagcacattatatgaccagcagcaacaccagcccaacgacaccatccaccaatgccacttaccagcttcaagaaccgccatctggcatcaccagccaagcagttacagatcccacagcagagtacagcacaatccacagcccatcaacacccattaaagattcagattctgatcgattgcgtcgaggttcagatgggaaatcacgtggacggggccgaagaaacaataatccttcacctcccccagattctgatcttgagagagtgttcatctgggacttggatgagacaatcattgttttccactccttgcttactgggtcctacgccaacagatatgggagggatccacccacttcagtttcccttggactgcgaatggaagaaatgattttcaacttggcagacacacatttattttttaatgacttagaagaatgtgaccaagtccatatagatgatgtttcttcagatgataacggacaggacctaagcacatataactttggaacagatggctttcctgctgcagcaaccagtgctaacttatgtttggcaactggtgtacggggcggtgtggactggatgagaaagttggccttccgctacagacgggtaaaagagatctacaacacctacaaaaataatgttggaggtctgcttggtccagctaagagggaagcctggctgcagttgagggccgaaattgaagccctgaccgactcctggttgacactggccctgaaagcactctcgctcattcactcccggacaaactgtgtgaatattttagtaacaactactcagctcatcccagcattggcgaaagtcctgctgtatgggttaggaattgtatttccaatagaaaatatttacagtgcaactaaaataggaaaagaaagctgttttgagagaataattcaaaggtttggaagaaaagtggtgtatgttgttataggagatggtgtagaagaagaacaaggagcaaaaaagcacgcgatgcccttctggaggatctccagccactcggacctcatggccctgcaccatgccttggaactggagtacctgtaacagcgctcggcactttgacagcgcacagctgctctgtgaccagggacagatccagcaggccccagtctcgcatcagcgccggcctccagaacttagcaatttccgcctggtgatgcgcagttgctgtcagtcttgacctctgcctttgtggtgaatggaggaccacgtctatttcatcagaacagctgttgactctagtactgtgaatccagtgaaaataagccatgagaatgttttagcacagcgttatgtgtctgccacattaactacacggttcaaacctgtgaagaaaggacctgcaaacgcttcagttgttagcattttcaatgtgatataaacagcttctccaatacagcaaacctaattgcacaacagagactgaaatgtgtttcctgaataccagtggaggaattttcttgtaaagaaggtttactttttggtgtctcatacccagggtaatctgtacatctctacttatttatgaacagactttttttaaaaagataaaaaaacagctttattgaggtataattcacccaccagacttttttaaacatcaaataattgaagagacaatagcattagaaataagtgattaaaggcctctgcctcacaacatggcaagtacagtactttgaattttagcacattgcatagtagttttaagtatgtctaatttaaacgtataatatgtacatcactgagacaatcatgtacagaaagaatttttggtgtaaatttgtaataatggataattcttttacatattgtttagggaaatgatattgaaaggtagcaatgcctggatagtgaagcatgaggcagcacgtgcacaaattcatgtgccgtgccttatctgagttttcggtataaatatgtagataatggattttttttttttagataatgttgtcaagaccaaaagcatggatgtcaagtgtcagtaaggattttgttttctaaaattttttcctgcatcagttcttctgagggccttgatgaaataacacagcagtttcttaaacaatttgaaacaaaatgagctctcctaccacctcactttttcatttccacactaatgtattatatgtaactacttggaaaaaataattattcaaatgcttcttcccacaaagaatatagatgatagtagatatattttattaataaaatggttcatgaatcggagactaacaaagttttcatgtgctcagaattattaattatcgtgtctgcattttctttcgataaaggaagacacacgatgctaatccggaaatcagcaaactttgcattactccctatgtgcgtattttctctttcttcctgtcaccctgaggaaggttcattgccattgtcatcaccatggaaacaacgttcctctccacctgcattatgtactacatgacaggcatcaatctggggaaataataaaattatcacctttgtcagaccataagagtttctccaaaagtggtcagtttggctgggcaatattttctctcatctaacaaacacaatccattgtcatgaaattacccttaggatgagtcttctttaatcaatcatatattgggcggaaaaaacaccagctttgacccgaagtagttgaagagctacttcattcttttctgaagttgtgtgttgctgctagaaatagtcatttgtgaattatccaaattgtttaaattcacaattgaattagttttttcttcctttttgcttgaagcaaacagttgacaatttttaaccttttcattttatgtttttgtactctgcagactgaaaagacaaagtttatcttggccttactgtataaaggtgtgctgtgtccaccgttgtgtacagaatttttcttcattaattttgtgtttaagttaataaaatttatttgtgatgtactgtaa

SEQ ID NO: 155 - DNA, 3610 bp, homo sapiens
atgttgctgtttcctcaagttgcaggtctatggaaatgcaggatctaaccagcccgcatagccgtctgagtggtagtagtgaatcccccagtggccccaaactcggtaactctcatataaatagtaattccatgactcccaatggcaccgaagttaaaacagagccaatgagcagcagtgaaacagcttcaacgacagccgacgggtctttaaacaatttctcaggttcagcaattgggagcagtagtttcagcccacgaccaactcaccagttctctccaccacagatttacccttccaacagaccatacccacatattctccctaccccttcctcacaaactatggctgcatatgggcaaacacagtttaccacaggaatgcaacaagctacagcctatgccacgtacccacagccaggacagccgtacggcatttcctcatatggcatcaagactgaaggtggattgtcacagtctcagtcacctggacagacaggatttctcagctatggcacaagcttcagtacccctcaacctggacaggcaccatacagctaccagatgcaaggtagcagttttacaacatcatcaggaatatatacaggaaataattcactcacaaattcctctggatttaatagttcacagcaggactatccgtcttatcccagttttggccagggtcagtacgcacagtattataacagctcaccgtatccagcacattatatgaccagcagcaacaccagcccaacgacaccatccaccaatgccacttaccagcttcaagaaccgccatctggcatcaccagccaagcagttacagatcccacagcagagtacagcacaatccacagcccatcaacacccattaaagattcagattctgatcgattgcgtcgaggttcagatgggaaatcacgtggacggggccgaagaaacaataatccttcacctcccccagattctgatcttgagagagtgttcatctgggacttggatgagacaatcattgttttccactccttgcttactgggtcctacgccaacagatatgggagggaatgtgaccaagtccatatagatgatgtttcttcagatgataacggacaggacctaagcacatataactttggaacagatggctttcctgctgcagcaaccagtgctaacttatgtttggcaactggtgtacggggcggtgtggactggatgagaaagttggccttccgctacagacgggtaaaagagatctacaacacctacaaaaataatgttggaggtctgcttggtccagctaagagggaagcctggctgcagttgagggccgaaattgaagccctgaccgactcctggttgacactggccctgaaagcactctcgctcattcactcccggacaaactgtgtgaatattttagtaacaactactcagctcatcccagcattggcgaaagtcctgctgtatgggttaggaattgtatttccaatagaaaatatttacagtgcaactaaaataggaaaagaaagctgttttgagagaataattcaaaggtttggaagaaaagtggtgtatgttgttataggagatggtgtagaagaagaacaaggagcaaaaaagcacgcgatgcccttctggaggatctccagccactcggacctcatggccctgcaccatgccttggaactggagtacctgtaacagcgctcggcactttgacagcgcacagctgctctgtgaccagggacagatccagcaggccccagtctcgcatcagcgccggcctccagaacttagcaatttccgcctggtgatgcgcagttgctgtcagtcttgacctctgcctttgtggtgaatggaggaccacgtctatttcatcagaacagctgttgactctagtactgtgaatccagtgaaaataagccatgagaatgttttagcacagcgttatgtgtctgccacattaactacacggttcaaacctgtgaagaaaggacctgcaaacgcttcagttgttagcattttcaatgtgatataaacagcttctccaatacagcaaacctaattgcacaacagagactgaaatgtgtttcctgaataccagtggaggaattttcttgtaaagaaggtttactttttggtgtctcatacccagggtaatctgtacatctctacttatttatgaacagactttttttaaaaagataaaaaaacagctttattgaggtataattcacccaccagacttttttaaacatcaaataattgaagagacaatagcattagaaataagtgattaaaggcctctgcctcacaacatggcaagtacagtactttgaattttagcacattgcatagtagttttaagtatgtctaatttaaacgtataatatgtacatcactgagacaatcatgtacagaaagaatttttggtgtaaatttgtaataatggataattcttttacatattgtttagggaaatgatattgaaaggtagcaatgcctggatagtgaagcatgaggcagcacgtgcacaaattcatgtgccgtgccttatctgagttttcggtataaatatgtagataatggattttttttttttagataatgttgtcaagaccaaaagcatggatgtcaagtgtcagtaaggattttgttttctaaaattttttcctgcatcagttcttctgagggccttgatgaaataacacagcagtttcttaaacaatttgaaacaaaatgagctctcctaccacctcactttttcatttccacactaatgtattatatgtaactacttggaaaaaataattattcaaatgcttcttcccacaaagaatatagatgatagtagatatattttattaataaaatggttcatgaatcggagactaacaaagttttcatgtgctcagaattattaattatcgtgtctgcattttctttcgataaaggaagacacacgatgctaatccggaaatcagcaaactttgcattactccctatgtgcgtattttctctttcttcctgtcaccctgaggaaggttcattgccattgtcatcaccatggaaacaacgttcctctccacctgcattatgtactacatgacaggcatcaatctggggaaataataaaattatcacctttgtcagaccataagagtttctccaaaagtggtcagtttggctgggcaatattttctctcatctaacaaacacaatccattgtcatgaaattacccttaggatgagtcttctttaatcaatcatatattgggcggaaaaaacaccagctttgacccgaagtagttgaagagctacttcattcttttctgaagttgtgtgttgctgctagaaatagtcatttgtgaattatccaaattgtttaaattcacaattgaattagttttttcttcctttttgcttgaagcaaacagttgacaatttttaaccttttcattttatgtttttgtactctgcagactgaaaagacaaagtttatcttggccttactgtataaaggtgtgctgtgtccaccgttgtgtacagaatttttcttcattaattttgtgtttaagttaataaaatttatttgtgatgtactgtaa

SEQ ID NO: 156 - DNA, 1655 bp, homo sapiens
tgctgacactacaaggctcggagctccgggcactcagacatcatgagttggtccttgcacccccggaatttaattctctacttctatgctcttttatttctctcttcaacatgtgtagcatatgttgctaccagagacaactgctgcatcttagatgaaagattcggtagttattgtccaactacctgtggcattgcagatttcctgtctacttatcaaaccaaagtagacaaggatctacagtctttggaagacatcttacatcaagttgaaaacaaaacatcagaagtcaaacagctgataaaagcaatccaactcacttataatcctgatgaatcatcaaaaccaaatatgatagacgctgctactttgaagtccaggataatgttagaagaaattatgaaatatgaagcatcgattttaacacatgactcaagtattcgatatttgcaggaaatatataattcaaataatcaaaagattgttaacctgaaagagaaggtagcccagcttgaagcacagtgccaggaaccttgcaaagacacggtgcaaatccatgatatcactgggaaagattgtcaagacattgccaataagggagctaaacagagcgggctttactttattaaacctctgaaagctaaccagcaattcttagtctactgtgaaatcgatgggtctggaaatggatggactgtgtttcagaagagacttgatggcagtgtagatttcaagaaaaactggattcaatataaagaaggatttggacatctgtctcctactggcacaacagaattttggctgggaaatgagaagattcatttgataagcacacagtctgccatcccatatgcattaagagtggaactggaagactggaatggcagaaccagtactgcagactatgccatgttcaaggtgggacctgaagctgacaagtaccgcctaacatatgcctacttcgctggtggggatgctggagatgcctttgatggctttgattttggcgatgatcctagtgacaagtttttcacatcccataatggcatgcagttcagtacctgggacaatgacaatgataagtttgaaggcaactgtgctgaacaggatggatctggttggtggatgaacaagtgtcacgctggccatctcaatggagtttattaccaaggtggcacttactcaaaagcatctactcctaatggttatgataatggcattatttgggccacttggaaaacccggtggtattccatgaagaaaaccactatgaagataatcccattcaacagactcacaattggagaaggacagcaacaccacctggggggagccaaacaggtcagaccagagcaccctgcggaaacagaatatgactcactttaccctgaggatgatttgtagaaaattaactgctaacttctattgacccacaaagtttcagaaattctctgaaagtttcttccctttttctcttactatatttattgatttcaagtcttctattaaggacatttagccttcaatggaaattaaaactcatttaggactgtatttccaaattactgatatcagagttatttaaaaattgtttatttgaggagataacatttcaactttgttcctaaatatataataataaaatgattgacttt

SEQ ID NO: 157 - DNA, 4068 bp, homo sapiens
gaattcctcctctcttcaccccgttagctgttttcaatgtaatgctgccgtccttctcttgcactgccttctgcgctaacacctccattcctgtttataaccgtgtatttattacttaatgtatataatgtaatgttttgtaagttattaatttatatatctaacattgcctgccaatggtggtgttaaatttgtgtagaaaactctgcctaagagttacgactttttcttgtaatgttttgtattgtgtattatataacccaaacgtcacttagtagagacatatggcccccttggcagagaggacaggggtgggcttttgttcaaagggtctgccctttccctgcctgagttgctacttctgcacaacccctttatgaaccagttttcacccgaattttgactgtttcatttagaagaaaagcaaaatgagaaaaagctttcctcatttctccttgagatggcaaagcactcagaaatgacatcacataccctaaagaaccctgggatgactaaggcagagagagtctgagaaaactctttggtgcttctgcctttagttttaggacacatttatgcagatgagcttataagagaccgttccctccgccttcttcctcagaggaagtttcttggtagatcaccgacacctcatccaggcggggggttggggggaaacttggcaccagccatcccaggcagagcaccactgtgatttgttctcctggtggagagagctggaaggaaggagccagcgtgcaaataatgaaggagcacgggggcaccttcagtagcaccggaatcagcggtggtagcggtgactctgctatggacagcctgcagccgctccagcctaactacatgcctgtgtgtttgtttgcagaagaatcttatcaaaaattagcaatggaaacgctggaggaattagactggtgtttagaccagctagagaccatacagacctaccggtctgtcagtgagatggcttctaacaagttcaaaagaatgctgaaccgggagctgacacacctctcagagatgagccgatcagggaaccaggtgtctgaatacatttcaaatactttcttagacaagcagaatgatgtggagatcccatctcctacccagaaagacagggagaaaaagaaaaagcagcagctcatgacccagataagtggagtgaagaaattaatgcatagttcaagcctaaacaatacaagcatctcacgctttggagtcaacactgaaaatgaagatcacctggccaaggagctggaagacctgaacaaatggggtcttaacatctttaatgtggctggatattctcacaatagacccctaacatgcatcatgtatgctatattccaggaaagagacctcctaaagacattcagaatctcatctgacacatttataacctacatgatgactttagaagaccattaccattctgacgtggcatatcacaacagcctgcacgctgctgatgtagcccagtcgacccatgttctcctttctacaccagcattagacgctgtcttcacagatttggagatcctggctgccatttttgcagctgccatccatgacgttgatcatcctggagtctccaatcagtttctcatcaacacaaattcagaacttgctttgatgtataatgatgaatctgtgttggaaaatcatcaccttgctgtgggtttcaaactgctgcaagaagaacactgtgacatcttcatgaatctcaccaagaagcagcgtcagacactcaggaagatggttattgacatggtgttagcaactgatatgtctaaacatatgagcctgctggcagacctgaagacaatggtagaaacgaagaaagttacaagttcaggcgttcttctcctagacaactataccgatcgcattcaggtccttcgcaacatggtacactgtgcagacctgagcaaccccaccaagtccttggaattgtatcggcaatggacagaccgcatcatggaggaatttttccagcagggagacaaagagcgggagaggggaatggaaattagcccaatgtgtgataaacacacagcttctgtggaaaaatcccaggttggtttcatcgactacattgtccatccattgtgggagacatgggcagatttggtacagcctgatgctcaggacattctcgataccttagaagataacaggaactggtatcagagcatgatacctcaaagtccctcaccaccactggacgagcagaacagggactgccagggtctgatggagaagtttcagtttgaactgactctcgatgaggaagattctgaaggacctgagaaggagggagagggacacagctatttcagcagcacaaagacgctttgtgtgattgatccagaaaacagagattccctgggagagactgacatagacattgcaacagaagacaagtcccccgtggatacataatccccctctccctgtggagatgaacattctatccttgatgagcatgccagctatgtggtagggccagcccaccatgggggccaagacctgcacaggacaagggccacctggcctttcagttacttgagtttggagtcagaaagcaagaccaggaagcaaatagcagctcaggaaatcccacggttgacttgccttgatggcaagcttggtggagagggctgaagctgttgctgggggccgattctgatcaagacacatggcttgaaaatggaagacacaaaactgagagatcattctgcactaagtttcgggaacttatccccgacagtgactgaactcactgactaataacttcatttatgaatcttctcacttgtccctttgtctgccaacctgtgtgccttttttgtaaaacattttcatgtctttaaaatgcctgttgaatacctggagtttagtatcaacttctacacagataagctttcaaagttgacaaacttttttgactctttctggaaaagggaaagaaaatagtcttccttctttcttgggcaatatccttcactttactacagttacttttgcaaacagacagaaaggatacacttctaaccacattttacttccttcccctgttgtccagtccaactccacagtcactcttaaaacttctctctgtttgcctgcctccaacagtacttttaactttttgctgtaaacagaataaaattgaacaaattagggggtagaaaggagcagtggtgtcgttcaccgtgagagtctgcatagaactcagcagtgtgccctgctgtgtcttggaccctgccccccacaggagttgctacagtccctggccctgcttcccatcctcctctcttcaccccgttagctgttttcaatgtaatgctgccgtccttctcttgcactgccttctgcgctaacacctccattcctgtttataaccgtgtatttattacttaatgtatataatgtaatgttttgtaagttattaatttatatatctaacattgcctgccaatggtggtgttaaatttgtgtagaaaactctgcctaagagttacgactttttcttgtaatgttttgtattgtgtattatataacccaaacgtcacttagtagagacatatggcccccttggcagagaggacaggggtgggcttttgttcaaagggtctgccctttccctgcctgagttgctacttctgcacaacccctttatgaaccagttttggaaacaatattctcacattagatactaaatggtttatactgagtcttttacttttgtatagcttgataggggcaggggcaatgggatgtagtttttacccaggttctatccaaatctatgtgggcatgagttgggttataactggatcctactatcattgtggctttggttcaaaaggaaacactacatttgctcacagatgattcttctgattcttctgaatgctcccgaactactgactttgaagaggtagcctcctgcctgccattaagcaggaatgtcatgttccagttcattacaaaagaaaacaataaaacaatgtgaatttttataataaaaaaaaaaaaaaggaattc

SEQ ID NO: 158 - DNA, 2441 bp, homo sapiens
cactgaataaactctaggttcccatttctttcagccagatcctcccagggaatcactacaggctggttagccaaaaagtcctgattttctgctcaatagaggtccttactggaaggcagcatgtccaatgttaccttgagaaaaatgtctcccacaggaaatgagatgaagagcaccactcagggaaccacacggaagcagcaggattttcacgaggtgaacaaaagaagaactttcttacaggataacagttggataaagaaacgccctgaagaagaaaaagatgaaaattacggtagggtggtgctcaaccgacataattcccatgatgcattggacaggaaagtaaatgagagagatgtgccaaaagctacaattagtcggtacagttctgatgacactttggacaggatctcagacagaaatgatgctgctaaaacatataaggccaataccttggataaccaactaaccaataggagcatgtccatgtttagatcactggaagtaacaaagttgcaacctggcggttcattgaatgccaacacctccaacaccatagcatccacttctgctactactcctgtaaagaagaagaggcagtcctggtttccaccgccccctccaggttacaatgcctcttcgagcacaggaaccaggagacgggaaccaggtgttcaccctccaatacctccaaagcccagttctcctgtttcttctcctaaccagctgagacaggataataggcagatacatccacctaaaccaggtgtatatacagaaaccaacagatctgctgaaagaaatataaggagtcaggatcttgataacatcgtcaaagtggccacttcacttcagagaagtgacaaaggtgaagaattggataatctcatcaaaatgaacaaaagcttgaataggaatcaaggtcttgatagtctcttcagagcaaatccaaaggtagaagaaagagagaaaagagccaaaagccttgaaagtctcatctatatgagtacccggacagataaagatggcaaaggaatccaaagccttggaagtccgattaaagttaatcaaaggactgacaaaaatgagaaaggaagacaaaatctcgaatctgttgctaaagtgaatgccaggatgaataaaacgagcagaagaagtgaagaccttgataatgctactgaagtaaatcccaaaggacatgaaaataccactggaaaaaaagaccttgatgggcttattaaagtggatcctgaaacaaataaaaatattacgaggggccagagccttgataatctcatcaaagtgacccctgaagtaaagagaagtaaccaaggttccaaagaccttaataacttcatcaaagtgtatccaggaacagaaaaaagtactgaagggggccaaagtctcgacagcctcattaaagtgactcctgaaagaaacagaactaaccaagggaaccaagacttggaaaatcttatcaaagtgatcccttcagcaaacaaaagcagtgaacaaggtcttgatgaacatattaatgtcagccccaaagctgtcaaaaacactgatggaaaacaagatcttgataaactcatcaaggtgaatcctgaaattttcacaaacaaccaaagaaaccaagatcttgctaacctcatcaaagtaaatcctgcagtaatcagaaacaatcagagccaagacttggaaaatcttatcaaagtgatcccttcagctcttagaaacactaatcgagaccagaacctggaaaatttaattgaagtaaattctcatgtgtctgaaaacaagaatggaagctctaacactggagccaagcaggcaggaccacaggatactgttgtgtacacaaggacatatgtggagaatagtaaatcacccaaggatggatatcaggagaatatctctggaaaatacatacaaactgtttattcaacttctgataggtctgtcattgaaagagatatgtgcacttactgccgaaaacccttgggtgtagaaactaaaatgattttagatgaattacaaatttgctgccattctacttgctttaagtgtgaaatatgcaagcagcctttggaaaatctacaagcgggtgatagtatttggatttatagacagacaatacactgtgaaccttgctactctaaaattatggcaaagtggattccataactctggcacaaggaaatcaagatgaaaagcactcattaaggaattaaagttacaagttttatcttaataatatgtaatctagaaaagctttcacattgaagatcaactcttgtacaaaattaacaattctgttattgcataagtaatctaattgtcttcaataaggtcacacacataaaaagagccatctggtctctggctagagttagcaataaaaagttcaaatggttccagaaaaaaaaaaaaaaaaaaaa

SEQ ID NO: 159 - DNA, 4128 bp, homo sapiens
gcggcgcgcggggactcggaggtactgggcgcgcgcggctccggctcgggacgcctcgggacgcctcggggtcgggctccggctgcggctgctgctgcggcgcccgcgctccggtgcgctccgcctcctgtgcccgccgcggagcgcagtctgcgcgcccgccgtgcgccctcagctccttttcctgagcccgccgcgatgggagctgcgcggggatccccggccagaccccgccggttgcctctgctcagcgtcctgctgctgccgctgctgggcggtacccagacagccattgtcttcatcaagcagccgtcctcccaggatgcactgcaggggcgccgggcgctgcttcgctgtgaggttgaggctccgggcccggtacatgtgtactggctgctcgatggggcccctgtccaggacacggagcggcgtttcgcccagggcagcagcctgagctttgcagctgtggaccggctgcaggactctggcaccttccagtgtgtggctcgggatgatgtcactggagaagaagcccgcagtgccaacgcctccttcaacatcaaatggattgaggcaggtcctgtggtcctgaagcatccagcctcggaagctgagatccagccacagacccaggtcacacttcgttgccacattgatgggcaccctcggcccacctaccaatggttccgagatgggacccccctttctgatggtcagagcaaccacacagtcagcagcaaggagcggaacctgacgctccggccagctggtcctgagcatagtgggctgtattcctgctgcgcccacagtgcttttggccaggcttgcagcagccagaacttcaccttgagcattgctgatgaaagctttgccagggtggtgctggcaccccaggacgtggtagtagcgaggtatgaggaggccatgttccattgccagttctcagcccagccacccccgagcctgcagtggctctttgaggatgagactcccatcactaaccgcagtcgccccccacacctccgcagagccacagtgtttgccaacgggtctctgctgctgacccaggtccggccacgcaatgcagggatctaccgctgcattggccaggggcagaggggcccacccatcatcctggaagccacacttcacctagcagagattgaagacatgccgctatttgagccacgggtgtttacagctggcagcgaggagcgtgtgacctgccttccccccaagggtctgccagagcccagcgtgtggtgggagcacgcgggagtccggctgcccacccatggcagggtctaccagaagggccacgagctggtgttggccaatattgctgaaagtgatgctggtgtctacacctgccacgcggccaacctggctggtcagcggagacaggatgtcaacatcactgtggccactgtgccctcctggctgaagaagccccaagacagccagctggaggagggcaaacccggctacttggattgcctgacccaggccacaccaaaacctacagttgtctggtacagaaaccagatgctcatctcagaggactcacggttcgaggtcttcaagaatgggaccttgcgcatcaacagcgtggaggtgtatgatgggacatggtaccgttgtatgagcagcaccccagccggcagcatcgaggcgcaagcccgtgtccaagtgctggatgggagcagcctcccagagtgggtgacagacaacgctgggaccctgcattttgcccgggtgactcgagatgacgctggcaactacacttgcattgcctccaacgggccgcagggccagattcgtgcccatgtccagctcactgtggcagtttttatcaccttcaaagtggaaccagagcgtacgactgtgtaccagggccacacagccctactgcagtgcgaggcccagggggaccccaagccgctgattcagtggaaaggcaaggaccgcatcctggaccccaccaagctgggacccaggatgcacatcttccagaatggctccctggtgatccatgacgtggcccctgaggactcaggccgctacacctgcattgcaggcaacagctgcaacatcaagcacacggaggcccccctctatgtcgtggacaagcctgtgccggaggagtcggagggccctggcagccctcccccctacaagatgatccagaccattgggttgtcggtgggtgccgctgtggcctacatcattgccgtgctgggcctcatgttctactgcaagaagcgctgcaaagccaagcggctgcagaagcagcccgagggcgaggagccagagatggaatgcctcaacggtgggcctttgcagaacgggcagccctcagcagagatccaagaagaagtggccttgaccagcttgggctccggccccgcggccaccaacaaacgccacagcacaagtgataagatgcacttcccacggtctagcctgcagcccatcaccacgctggggaagagtgagtttggggaggtgttcctggcaaaggctcagggcttggaggagggagtggcagagaccctggtacttgtgaagagcctgcagagcaaggatgagcagcagcagctggacttccggagggagttggagatgtttgggaagctgaaccacgccaacgtggtgcggctcctggggctgtgccgggaggctgagccccactacatggtgctggaatatgtggatctgggagacctcaagcagttcctgaggatttccaagagcaaggatgaaaaattgaagtcacagcccctcagcaccaagcagaaggtggccctatgcacccaggtagccctgggcatggagcacctgtccaacaaccgctttgtgcataaggacttggctgcgcgtaactgcctggtcagtgcccagagacaagtgaaggtgtctgccctgggcctcagcaaggatgtgtacaacagtgagtactaccacttccgccaggcctgggtgccgctgcgctggatgtcccccgaggccatcctggagggtgacttctctaccaagtctgatgtctgggccttcggtgtgctgatgtgggaagtgtttacacatggagagatgccccatggtgggcaggcagatgatgaagtactggcagatttgcaggctgggaaggctagacttcctcagcccgagggctgcccttccaaactctatcggctgatgcagcgctgctgggccctcagccccaaggaccggccctccttcagtgagattgccagcgccctgggagacagcaccgtggacagcaagccgtgaggagggagcccgctcaggatggcctgggcaggggaggacatctctagagggaagctcacagcatgatgggcaagatccctgtcctcctgggccctgaggcccctgccctagtgcaacaggcattgctgaggtctgagcagggcctggcctttcctcctcttcctcaccctcatcctttgggaggctgacttggacccaaactgggcgactagggctttgagctgggcagttttccctgccacctcttctctatcagggacagtgtgggtgccacaggtaaccccaatttctggccttcaacttctccccttgaccgggtccaactctgccactcatctgccaactttgcctggggagggctaggcttgggatgagctgggtttgtggggagttccttaatattctcaagttctgggcacacagggttaatgagtctcttggcccactggtcccacttgggggtctagaccaggattatagaggacacagcaagtgagtcctccccactctgggcttgtgcacactgacccagacccacgtcttccccacccttctctcctttcctcatcctaagtgcctggcagatgaaggagttttcaggagcttttgacactatataaaccgccctttttgtatgcaccacgggcggcttttatatgtaattgcagcgtggggtgggtgggcatgggaggtaggggtgggccctggagatgaggagggtgggccatccttaccccacacttttattgttgtcgttttttgtttgttttgtttttttgtttttgtttttgtttttacactcgctgctctcaataaataagccttttttacaacctg

SEQ ID NO: 160 - DNA, 3859 bp, homo sapiens
gcggcgcgcggggactcggaggtactgggcgcgcgcggctccggctcgggacgcctcgggacgcctcggggtcgggctccggctgcggctgctgctgcggcgcccgcgctccggtgcgctccgcctcctgtgcccgccgcggagcgcagtctgcgcgcccgccgtgcgccctcagctccttttcctgagcccgccgcgatgggagctgcgcggggatccccggccagaccccgccggttgcctctgctcagcgtcctgctgctgccgctgctgggcggtacccagacagccattgtcttcatcaagcagccgtcctcccaggatgcactgcaggggcgccgggcgctgcttcgctgtgaggttgaggctccgggcccggtacatgtgtactggctgctcgatggggcccctgtccaggacacggagcggcgtttcgcccagggcagcagcctgagctttgcagctgtggaccggctgcaggactctggcaccttccagtgtgtggctcgggatgatgtcactggagaagaagcccgcagtgccaacgcctccttcaacatcaaatggattgaggcaggtcctgtggtcctgaagcatccagcctcggaagctgagatccagccacagacccaggtcacacttcgttgccacattgatgggcaccctcggcccacctaccaatggttccgagatgggacccccctttctgatggtcagagcaaccacacagtcagcagcaaggagcggaacctgacgctccggccagctggtcctgagcatagtgggctgtattcctgctgcgcccacagtgcttttggccaggcttgcagcagccagaacttcaccttgagcattgctgatgaaagctttgccagggtggtgctggcaccccaggacgtggtagtagcgaggtatgaggaggccatgttccattgccagttctcagcccagccacccccgagcctgcagtggctctttgaggatgagactcccatcactaaccgcagtcgccccccacacctccgcagagccacagtgtttgccaacgggtctctgctgctgacccaggtccggccacgcaatgcagggatctaccgctgcattggccaggggcagaggggcccacccatcatcctggaagccacacttcacctagcagagattgaagacatgccgctatttgagccacgggtgtttacagctggcagcgaggagcgtgtgacctgccttccccccaagggtctgccagagcccagcgtgtggtgggagcacgcgggagtccggctgcccacccatggcagggtctaccagaagggccacgagctggtgttggccaatattgctgaaagtgatgctggtgtctacacctgccacgcggccaacctggctggtcagcggagacaggatgtcaacatcactgtggccaatgggagcagcctcccagagtgggtgacagacaacgctgggaccctgcattttgcccgggtgactcgagatgacgctggcaactacacttgcattgcctccaacgggccgcagggccagattcgtgcccatgtccagctcactgtggcagtttttatcaccttcaaagtggaaccagagcgtacgactgtgtaccagggccacacagccctactgcagtgcgaggcccagggggaccccaagccgctgattcagtggaaaggcaaggaccgcatcctggaccccaccaagctgggacccaggatgcacatcttccagaatggctccctggtgatccatgacgtggcccctgaggactcaggccgctacacctgcattgcaggcaacagctgcaacatcaagcacacggaggcccccctctatgtcgtggacaagcctgtgccggaggagtcggagggccctggcagccctcccccctacaagatgatccagaccattgggttgtcggtgggtgccgctgtggcctacatcattgccgtgctgggcctcatgttctactgcaagaagcgctgcaaagccaagcggctgcagaagcagcccgagggcgaggagccagagatggaatgcctcaacggtgggcctttgcagaacgggcagccctcagcagagatccaagaagaagtggccttgaccagcttgggctccggccccgcggccaccaacaaacgccacagcacaagtgataagatgcacttcccacggtctagcctgcagcccatcaccacgctggggaagagtgagtttggggaggtgttcctggcaaaggctcagggcttggaggagggagtggcagagaccctggtacttgtgaagagcctgcagagcaaggatgagcagcagcagctggacttccggagggagttggagatgtttgggaagctgaaccacgccaacgtggtgcggctcctggggctgtgccgggaggctgagccccactacatggtgctggaatatgtggatctgggagacctcaagcagttcctgaggatttccaagagcaaggatgaaaaattgaagtcacagcccctcagcaccaagcagaaggtggccctatgcacccaggtagccctgggcatggagcacctgtccaacaaccgctttgtgcataaggacttggctgcgcgtaactgcctggtcagtgcccagagacaagtgaaggtgtctgccctgggcctcagcaaggatgtgtacaacagtgagtactaccacttccgccaggcctgggtgccgctgcgctggatgtcccccgaggccatcctggagggtgacttctctaccaagtctgatgtctgggccttcggtgtgctgatgtgggaagtgtttacacatggagagatgccccatggtgggcaggcagatgatgaagtactggcagatttgcaggctgggaaggctagacttcctcagcccgagggctgcccttccaaactctatcggctgatgcagcgctgctgggccctcagccccaaggaccggccctccttcagtgagattgccagcgccctgggagacagcaccgtggacagcaagccgtgaggagggagcccgctcaggatggcctgggcaggggaggacatctctagagggaagctcacagcatgatgggcaagatccctgtcctcctgggccctgaggcccctgccctagtgcaacaggcattgctgaggtctgagcagggcctggcctttcctcctcttcctcaccctcatcctttgggaggctgacttggacccaaactgggcgactagggctttgagctgggcagttttccctgccacctcttcctctatcagggacagtgtgggtgccacaggtaaccccaatttctggccttcaacttctccccttgaccgggtccaactctgccactcatctgccaactttgcctggggagggctaggcttgggatgagctgggtttgtggggagttccttaatattctcaagttctgggcacacagggttaatgagtctcttggcccactggtcccacttgggggtctagaccaggattatagaggacacagcaagtgagtcctccccactctgggcttgtgcacactgacccagacccacgtcttccccacccttctctcctttcctcatcctaagtgcctggcagatgaaggagttttcaggagcttttgacactatataaaccgccctttttgtatgcaccacgggcggcttttatatgtaattgcagcgtggggtgggtgggcatgggaggtaggggtgggccctggagatgaggagggtgggccatccttaccccacacttttattgttgtcgttttttgtttgttttgtttttttgtttttgtttttgtttttacactcgctgctctcaataaataagccttttttacaacctg

SEQ ID NO: 161 - DNA, 4081 bp, homo sapiens
gcggcgcgcggggactcggaggtactgggcgcgcgcggctccggctcgggacgcctcgggacgcctcggggtcgggctccggctgcggctgctgctgcggcgcccgcgctccggtgcgctccgcctcctgtgcccgccgcggagcgcagtctgcgcgcccgccgtgcgccctcagctccttttcctgagcccgccgcgatgggagctgcgcggggatccccggccagaccccgccggttgcctctgctcagcgtcctgctgctgccgctgctgggcggtacccagacagccattgtcttcatcaagcagccgtcctcccaggatgcactgcaggggcgccgggcgctgcttcgctgtgaggttgaggctccgggcccggtacatgtgtactggctgctcgatggggcccctgtccaggacacggagcggcgtttcgcccagggcagcagcctgagctttgcagctgtggaccggctgcaggactctggcaccttccagtgtgtggctcgggatgatgtcactggagaagaagcccgcagtgccaacgcctccttcaacatcaaatggattgaggcaggtcctgtggtcctgaagcatccagcctcggaagctgagatccagccacagacccaggtcacacttcgttgccacattgatgggcaccctcggcccacctaccaatggttccgagatgggacccccctttctgatggtcagagcaaccacacagtcagcagcaaggagcggaacctgacgctccggccagctggtcctgagcatagtgggctgtattcctgctgcgcccacagtgcttttggccaggcttgcagcagccagaacttcaccttgagcattgctgatgaaagctttgccagggtggtgctggcaccccaggacgtggtagtagcgaggtatgaggaggccatgttccattgccagttctcagcccagccacccccgagcctgcagtggctctttgaggatgagactcccatcactaaccgcagtcgccccccacacctccgcagagccacagtgtttgccaacgggtctctgctgctgacccaggtccggccacgcaatgcagggatctaccgctgcattggccaggggcagaggggcccacccatcatcctggaagccacacttcacctagcagagattgaagacatgccgctatttgagccacgggtgtttacagctggcagcgaggagcgtgtgacctgccttccccccaagggtctgccagagcccagcgtgtggtgggagcacgcgggagtccggctgcccacccatggcagggtctaccagaagggccacgagctggtgttggccaatattgctgaaagtgatgctggtgtctacacctgccacgcggccaacctggctggtcagcggagacaggatgtcaacatcactgtggccactgtgccctcctggctgaagaagccccaagacagccagctggaggagggcaaacccggctacttggattgcctgacccaggccacaccaaaacctacagttgtctggtacagaaaccagatgctcatctcagaggactcacggttcgaggtcttcaagaatgggaccttgcgcatcaacagcgtggaggtgtatgatgggacatggtaccgttgtatgagcagcaccccagccggcagcatcgaggcgcaagcccgtgtccaagtgctggaaaagctcaagttcacaccaccaccccagccacagcagtgcatggagtttgacaaggaggccacggtgccctgttcagccacaggccgagagaagcccactattaagtgggaacgggcagatgggagcagcctcccagagtgggtgacagacaacgctgggaccctgcattttgcccgggtgactcgagatgacgctggcaactacacttgcattgcctccaacgggccgcagggccagattcgtgcccatgtccagctcactgtggcagtttttatcaccttcaaagtggaaccagagcgtacgactgtgtaccagggccacacagccctactgcagtgcgaggcccagggggaccccaagccgctgattcagtggaaagacaagcctgtgccggaggagtcggagggccctggcagccctcccccctacaagatgatccagaccattgggttgtcggtgggtgccgctgtggcctacatcattgccgtgctgggcctcatgttctactgcaagaagcgctgcaaagccaagcggctgcagaagcagcccgagggcgaggagccagagatggaatgcctcaacggtgggcctttgcagaacgggcagccctcagcagagatccaagaagaagtggccttgaccagcttgggctccggccccgcggccaccaacaaacgccacagcacaagtgataagatgcacttcccacggtctagcctgcagcccatcaccacgctggggaagagtgagtttggggaggtgttcctggcaaaggctcagggcttggaggagggagtggcagagaccctggtacttgtgaagagcctgcagagcaaggatgagcagcagcagctggacttccggagggagttggagatgtttgggaagctgaaccacgccaacgtggtgcggctcctggggctgtgccgggaggctgagccccactacatggtgctggaatatgtggatctgggagacctcaagcagttcctgaggatttccaagagcaaggatgaaaaattgaagtcacagcccctcagcaccaagcagaaggtggccctatgcacccaggtagccctgggcatggagcacctgtccaacaaccgctttgtgcataaggacttggctgcgcgtaactgcctggtcagtgcccagagacaagtgaaggtgtctgccctgggcctcagcaaggatgtgtacaacagtgagtactaccacttccgccaggcctgggtgccgctgcgctggatgtcccccgaggccatcctggagggtgacttctctaccaagtctgatgtctgggccttcggtgtgctgatgtgggaagtgtttacacatggagagatgccccatggtgggcaggcagatgatgaagtactggcagatttgcaggctgggaaggctagacttcctcagcccgagggctgcccttccaaactctatcggctgatgcagcgctgctgggccctcagccccaaggaccggccctccttcagtgagattgccagcgccctgggagacagcaccgtggacagcaagccgtgaggagggagcccgctcaggatggcctgggcaggggaggacatctctagagggaagctcacagcatgatgggcaagatccctgtcctcctgggccctgaggcccctgccctagtgcaacaggcattgctgaggtctgagcagggcctggcctttcctcctcttcctcaccctcatcctttgggaggctgacttggacccaaactgggcgactagggctttgagctgggcagttttccctgccacctcttcctctatcagggacagtgtgggtgccacaggtaaccccaatttctggccttcaacttctccccttgaccgggtccaactctgccactcatctgccaactttgcctggggagggctaggcttgggatgagctgggtttgtggggagttccttaatattctcaagttctgggcacacagggttaatgagtctcttggcccactggtcccacttgggggtctagaccaggattatagaggacacagcaagtgagtcctccccactctgggcttgtgcacactgacccagacccacgtcttccccacccttctctcctttcctcatcctaagtgcctggcagatgaaggagttttcaggagcttttgacactatataaaccgccctttttgtatgcaccacgggcggcttttatatgtaattgcagcgtggggtgggtgggcatgggaggtaggggtgggccctggagatgaggagggtgggccatccttaccccacacttttattgttgtcgttttttgtttgttttgtttttttgtttttgtttttgtttttacactcgctgctctcaataaataagccttttttacaacctg

SEQ ID NO: 162 - DNA, 4016 bp, homo sapiens
gcggcgcgcggggactcggaggtactgggcgcgcgcggctccggctcgggacgcctcgggacgcctcggggtcgggctccggctgcggctgctgctgcggcgcccgcgctccggtgcgctccgcctcctgtgcccgccgcggagcgcagtctgcgcgcccgccgtgcgccctcagctccttttcctgagcccgccgcgatgggagctgcgcggggatccccggccagaccccgccggttgcctctgctcagcgtcctgctgctgccgctgctgggcggtacccagacagccattgtcttcatcaagcagccgtcctcccaggatgcactgcaggggcgccgggcgctgcttcgctgtgaggttgaggctccgggcccggtacatgtgtactggctgctcgatggggcccctgtccaggacacggagcggcgtttcgcccagggcagcagcctgagctttgcagctgtggaccggctgcaggactctggcaccttccagtgtgtggctcgggatgatgtcactggagaagaagcccgcagtgccaacgcctccttcaacatcaaatggattgaggcaggtcctgtggtcctgaagcatccagcctcggaagctgagatccagccacagacccaggtcacacttcgttgccacattgatgggcaccctcggcccacctaccaatggttccgagatgggacccccctttctgatggtcagagcaaccacacagtcagcagcaaggagcggaacctgacgctccggccagctggtcctgagcatagtgggctgtattcctgctgcgcccacagtgcttttggccaggcttgcagcagccagaacttcaccttgagcattgctgatgaaagctttgccagggtggtgctggcaccccaggacgtggtagtagcgaggtatgaggaggccatgttccattgccagttctcagcccagccacccccgagcctgcagtggctctttgaggatgagactcccatcactaaccgcagtcgccccccacacctccgcagagccacagtgtttgccaacgggtctctgctgctgacccaggtccggccacgcaatgcagggatctaccgctgcattggccaggggcagaggggcccacccatcatcctggaagccacacttcacctagcagagattgaagacatgccgctatttgagccacgggtgtttacagctggcagcgaggagcgtgtgacctgccttccccccaagggtctgccagagcccagcgtgtggtgggagcacgcgggagtccggctgcccacccatggcagggtctaccagaagggccacgagctggtgttggccaatattgctgaaagtgatgctggtgtctacacctgccacgcggccaacctggctggtcagcggagacaggatgtcaacatcactgtggccactgtgccctcctggctgaagaagccccaagacagccagctggaggagggcaaacccggctacttggattgcctgacccaggccacaccaaaacctacagttgtctggtacagaaaccagatgctcatctcagaggactcacggttcgaggtcttcaagaatgggaccttgcgcatcaacagcgtggaggtgtatgatgggacatggtaccgttgtatgagcagcaccccagccggcagcatcgaggcgcaagcccgtgtccaagtgctggaaaagctcaagttcacaccaccaccccagccacagcagtgcatggagtttgacaaggaggccacggtgccctgttcagccacaggccgagagaagcccactattaagtgggaacgggcagatgggagcagcctcccagagtgggtgacagacaacgctgggaccctgcattttgcccgggtgactcgagatgacgctggcaactacacttgcattgcctccaacgggccgcagggccagattcgtgcccatgtccagctcactgtggcagtttttatcaccttcaaagtggaaccagagcgtacgactgtgtaccagggccacacagccctactgcagtgcgaggcccagggggaccccaagccgctgattcagtggaaaggcaaggaccgcatcctggaccccaccaagctgggacccaggatgcacatcttccagaatggctccctggtgatccatgacgtggcccctgaggactcaggccgctacacctgcattgcaggcaacagctgcaacatcaagcacacggaggcccccctctatgtcgtggacaagcctgtgccggaggagtcggagggccctggcagccctcccccctacaagatgatccagaccattgggttgtcggtgggtgccgctgtggcctacatcattgccgtgctgggcctcatgttctactgcaagaagcgctgcaaagccaagcggctgcagaagcagcccgagggcgaggagccagagatggaatgcctcaacggtgggcctttgcagaacgggcagccctcagcagagatccaagaagaagtggccttgaccagcttgggctccggccccgcggccaccaacaaacgccacagcacaagtgataagatgcacttcccacggtctagcctgcagcccatcaccacgctggggagacctcaagcagttcctgaggatttccaagagcaaggatgaaaaattgaagtcacagcccctcagcaccaagcagaaggtggccctatgcacccaggtagccctgggcatggagcacctgtccaacaaccgctttgtgcataaggacttggctgcgcgtaactgcctggtcagtgcccagagacaagtgaaggtgtctgccctgggcctcagcaaggatgtgtacaacagtgagtactaccacttccgccaggcctgggtgccgctgcgctggatgtcccccgaggccatcctggagggtgacttctctaccaagtctgatgtctgggccttcggtgtgctgatgtgggaagtgtttacacatggagagatgccccatggtgggcaggcagatgatgaagtactggcagatttgcaggctgggaaggctagacttcctcagcccgagggctgcccttccaaactctatcggctgatgcagcgctgctgggccctcagccccaaggaccggccctccttcagtgagattgccagcgccctgggagacagcaccgtggacagcaagccgtgaggagggagcccgctcaggatggcctgggcaggggaggacatctctagagggaagctcacagcatgatgggcaagatccctgtcctcctgggccctgaggcccctgccctagtgcaacaggcattgctgaggtctgagcagggcctggcctttcctcctcttcctcaccctcatcctttgggaggctgacttggacccaaactgggcgactagggctttgagctgggcagttttccctgccacctcttcctctatcagggacagtgtgggtgccacaggtaaccccaatttctggccttcaacttctccccttgaccgggtccaactctgccactcatctgccaactttgcctggggagggctaggcttgggatgagctgggtttgtggggagttccttaatattctcaagttctgggcacacagggttaatgagtctcttggcccactggtcccacttgggggtctagaccaggattatagaggacacagcaagtgagtcctccccactctgggcttgtgcacactgacccagacccacgtcttccccacccttctctcctttcctcatcctaagtgcctggcagatgaaggagttttcaggagcttttgacactatataaaccgccctttttgtatgcaccacgggcggcttttatatgtaattgcagcgtggggtgggtgggcatgggaggtaggggtgggccctggagatgaggagggtgggccatccttaccccacacttttattgttgtcgttttttgtttgttttgtttttttgtttttgtttttgtttttacactcgctgctctcaataaataagccttttttacaacctg

SEQ ID NO: 163 - DNA, 1275 bp, homo sapiens
cctccctacgggcgcctccggcagcccttcccgcgtgcgcagggctcagagccgttccgagatcttggaggtccgggtgggagtgggggtggggtgggggtgggggtgaaggtggggggcgggcgcgctcagggaaggcgggtgcgcgcctgcggggcggagatgggcagggggcggtgcgtgggtcccagtctgcagttaagggggcaggagtggcgctgctcacctctggtgccaaagggcggcgcagcggctgccgagctcggccctggaggcggcgagaacatggtgcgcaggttcttggtgaccctccggattcggcgcgcgtgcggcccgccgcgagtgagggttttcgtggttcacatcccgcggctcacgggggagtgggcagcgccaggggcgcccgccgctgtggccctcgtgctgatgctactgaggagccagcgtctagggcagcagccgcttcctagaagaccaggtcatgatgatgggcagcgcccgagtggcggagctgctgctgctccacggcgcggagcccaactgcgccgaccccgccactctcacccgacccgtgcacgacgctgcccgggagggcttcctggacacgctggtggtgctgcaccgggccggggcgcggctggacgtgcgcgatgcctggggccgtctgcccgtggacctggctgaggagctgggccatcgcgatgtcgcacggtacctgcgcgcggctgcggggggcaccagaggcagtaaccatgcccgcatagatgccgcggaaggtccctcagacatccccgattgaaagaaccagagaggctctgagaaacctcgggaaacttagatcatcagtcaccgaaggtcctacagggccacaactgcccccgccacaacccaccccgctttcgtagttttcatttagaaaatagagcttttaaaaatgtcctgccttttaacgtagatatatgccttcccccactaccgtaaatgtccatttatatcattttttatatattcttataaaaatgtaaaaaagaaaaacaccgcttctgccttttcactgtgttggagttttctggagtgagcactcacgccctaagcgcacattcatgtgggcatttcttgcgagcctcgcagcctccggaagctgtcgacttcatgacaagcattttgtgaactagggaagctcaggggggttactggcttctcttgagtcacactgctagcaaatggcagaaccaaagctcaaataaaaataaaataattttcattcattcactc

SEQ ID NO: 164 - DNA, 897 bp, homo sapiens
tgtgtgggggtctgcttggcggtgagggggctctacacaagcttcctttccgtcatgccggcccccaccctggctctgaccattctgttctctctggcaggtcatgatgatgggcagcgcccgagtggcggagctgctgctgctccacggcgcggagcccaactgcgccgaccccgccactctcacccgacccgtgcacgacgctgcccgggagggcttcctggacacgctggtggtgctgcaccgggccggggcgcggctggacgtgcgcgatgcctggggccgtctgcccgtggacctggctgaggagctgggccatcgcgatgtcgcacggtacctgcgcgcggctgcggggggcaccagaggcagtaaccatgcccgcatagatgccgcggaaggtccctcagacatccccgattgaaagaaccagagaggctctgagaaacctcgggaaacttagatcatcagtcaccgaaggtcctacagggccacaactgcccccgccacaacccaccccgctttcgtagttttcatttagaaaatagagcttttaaaaatgtcctgccttttaacgtagatataagccttcccccactaccgtaaatgtccatttatatcattttttatatattcttataaaaatgtaaaaaagaaaaacaccgcttctgccttttcactgtgttggagttttctggagtgagcactcacgccctaagcgcacattcatgtgggcatttcttgcgagcctcgcagcctccggaagctgtcgacttcatgacaagcattttgtgaactagggaagctcaggggggttactggcttctcttgagtcacactgctagcaaatggcagaaccaaagctcaaataaaaataaaataattttcattcattcactc

SEQ ID NO: 165 - DNA, 1515 bp, homo sapiens
cccaacctggggcgacttcaggtgtgccacattcgctaagtgctcggagttaatagcacctcctccgagcactcgctcacggcgtccccttgcctggaaagataccgcggtccctccagaggatttgagggacagggtcggagggggctcttccgccagcaccggaggaagaaagaggaggggctggctggtcaccagagggtggggcggaccgcgtgcgctcggcggctgcggagagggggagagcaggcagcgggcggcggggagcagcatggagccggcggcggggagcagcatggagccggcggcggggagcagcatggagccttcggctgactggctggccacggccgcggcccggggtcgggtagaggaggtgcgggcgctgctggaggcgggggcgctgcccaacgcaccgaatagttacggtcggaggccgatccaggtgggtagaaggtctgcagcgggagcaggggatggcgggcgactctggaggacgaagtttgcaggggaattggaatcaggtagcgcttcgattctccggaaaaaggggaggcttcctggggagttttcagaaggggtttgtaatcacagacctcctcctggcgacgccctgggggcttgggaaaccaaggaagaggaatgaggagccacgcgcgtacagatctctcgaatgctgagaagatctgaaggggggaacatatttgtattagatggaagtcatgatgatgggcagcgcccgagtggcggagctgctgctgctccacggcgcggagcccaactgcgccgaccccgccactctcacccgacccgtgcacgacgctgcccgggagggcttcctggacacgctggtggtgctgcaccgggccggggcgcggctggacgtgcgcgatgcctggggccgtctgcccgtggacctggctgaggagctgggccatcgcgatgtcgcacggtacctgcgcgcggctgcggggggcaccagaggcagtaaccatgcccgcatagatgccgcggaaggtccctcagacatccccgattgaaagaaccagagaggctctgagaaacctcgggaacttagatcatcagtcaccgaaggtcctacagggccacaactgcccccgccacaacccaccccgctttcgtagttttcatttagaaaatagagcttttaaaaatgtcctgccttttaacgtagatatatgccttcccccactaccgtaaatgtccatttatatcattttttatatattcttataaaaatgtaaaaaagaaaaacaccgcttctgccttttcactgtgttggagttttctggagtgagcactcacgccctaagcgcacattcatgtgggcatttcttgcgagcctcgcagcctccggaagctgtcgacttcatgacaagcattttgtgaactagggaagctcaggggggttactggcttctcttgagtcacactgctagcaaatggcagaaccaaagctcaaataaaaataaaataattttcattcattcactc

SEQ ID NO: 166 - DNA, 663 bp, homo sapiens
aacagaacagaaagctctccctcttgtgtgaggcagttgctgtggaaaccccacgggcaggaggcccccggccagcacatcctgtctgcttgtgtctgctgcagagttctgggaccggggccatgtctccacacctcactgctctcctgggcctagtgctctgcctggcccagaccatccacacgcaggagggggcccttcccagaccctccatctcggctgagccaggcactgtgatctccccggggagccatgtgactttcatgtgccggggcccggttggggttcaaacattccgcctggagagggaggatagagccaagtacaaagatagttataatgtgtttcgacttggtccatctgagtcagaggccagattccacattgactcagtaagtgaaggaaatgccgggctttatcgctgcctctattataagccccctggatggtctgagcacagtgacttcctggagctgctggtgaaagggactgtgccaggcactgaagcctccggatttgatgcaccatgaatgaggagaaatggcctcccgtcttgtgaacttcaatggggagaaataattagaatgagcaatagaaatgcacagatgcctatacatacatatacaaataaaaagatacgattcgcaaaaaaaaaaaaaaaaa

SEQ ID NO: 167 - DNA, 2270 bp, homo sapiens
ctcctccagcctctcacactctcctcagctctctcatctcctggaaccatggccagcacatccaccaccatcaggagccacagcagcagccgccggggtttcagtgccaactcagccaggctccctggggtcagccgctctggcttcagcagcgtctccgtgtcccgctccaggggcagtggtggcctgggtggtgcatgtggaggagctggctttggcagccgcagtctgtatggcctggggggctccaagaggatctccattggagggggcagctgtgccatcagtggcggctatggcagcagagccggaggcagctatggctttggtggcgccgggagtggatttggtttcggtggtggagccggcattggctttggtctgggtggtggagccggccttgctggtggctttgggggccctggcttccctgtgtgcccccctggaggcatccaagaggtcaccgtcaaccagagtctcctgactcccctcaacctgcaaatcgatcccaccatccagcgggtgcgggctgaggagcgtgaacagatcaagaccctcaacaacaagtttgcctccttcatcgacaaggtgcggttcctggagcagcagaacaaggttctggaaacaaagtggaccctgctgcaggagcagggcaccaagactgtgaggcagaacctggagccgttgttcgagcagtacatcaacaacctcaggaggcagctggacagcattgtcggggaacggggccgcctggactcagagctcagaggcatgcaggacctggtggaggacttcaagaacaaatatgaggatgaaatcaacaagcgcacagcagcagagaatgaatttgtgactctgaagaaggatgtggatgctgcctacatgaacaaggttgaactgcaagccaaggcagacactctcacagacgagatcaacttcctgagagccttgtatgatgcagagctgtcccagatgcagacccacatctcagacacatctgtggtgctgtccatggacaacaaccgcaacctggacctggacagcatcatcgctgaggtcaaggcccaatatgaggagattgctcagagaagccgggctgaggctgagtcctggtaccagaccaagtacgaggagctgcaggtcacagcaggcagacatggggacgacctgcgcaacaccaagcaggagattgctgagatcaaccgcatgatccagaggctgagatctgagatcgaccacgtcaagaagcagtgcgccaacctgcaggccgccattgctgatgctgagcagcgtggggagatggccctcaaggatgccaagaacaagctggaagggctggaggatgccctgcagaaggccaagcaggacctggcccggctgctgaaggagtaccaggagctgatgaatgtcaagctggccctggacgtggagatcgccacctaccgcaagctgctggagggtgaggagtgcaggctgaatggcgaaggcgttggacaagtcaacatctctgtggtgcagtccaccgtctccagtggctatggcggtgccagtggtgtcggcagtggcttaggcctgggtggaggaagcagctactcctatggcagtggtcttggcgttggaggtggcttcagttccagcagtggcagagccattgggggtggcctcagctctgttggaggcggcagttccaccatcaagtacaccaccacctcctcctccagcaggaagagctataagcactaaagtgcgtctgctagctctcggtcccacagtcctcaggcccctctctggctgcagagccctctcctcaggttgcctgtcctctcctggcctccagtctcccctgctgtcccaggtagagctggggatgaatgcttagtgccctcacttcttctctctctctctataccatctgagcacccattgctcaccatcagatcaacctctgattttacatcatgatgtaatcaccactggagcttcactgttactaaattattaatttcttgcctccagtgttctatctctgaggctgagcattataagaaaatgacctctgctccttttcattgcagaaaattgccaggggcttatttcagaacaacttccacttactttccactggctctcaaactctctaacttataagtgttgtgaacccccacccaggcagtatccatgaaagcacaagtgactagtcctatgatgtacaaagcctgtatctctgtgatgatttctgtgctcttcactgtttgcaattgctaaataaa

SEQ ID NO: 168 - DNA, 2222 bp, homo sapiens
catggccagcacatccaccaccatcaggagccacagcagcagccgccggggtttcagtgccaactcagccaggctccctggggtcagccgctctggcttcagcagcatctccgtgtcccgctccaggggcagtggtggcctgggtggtgcatgtggaggagctggctttggcagccgcagcttatatggcctggggggatccaagaggatctccattggagggggcagctgtgccatcagtggcggctatggcagcagagccagagcgagctatggctttggtggcgccgggagtggatttggtttcggtggtggagccggcattggctttgatctgggtggtggagccggccttgctggtggctttgggggccctggcttccctgtgtgcccccctggaggcatccaagaggtcactgtcaaccagagtctcctgactcccctcaacctgcaaattgaccccgccatccagcgggtgcgggccgaggagcgtgagcagatcaagaccctcaacaacaagtttgcctccttcatcgacaaggtgcggttcctggagcagcagaacaaggttctggaaacaaagtggaccctgctgcaggagcagggcaccaagactgtgaggcagaacctggagccgttgttcgagcagtacatcaacaacctcaggaggcagctggacagcattgtcggggaacggggccgcctggactcagagctcagaggcatgcaggacctggtggaggacttcaagaacaaatatgaggatgaaatcaacaagcgcacagcagcagagaatgaatttgtgactctgaagaaggatgtggatgctgcctacatgaacaaggttgaactgcaagccaaggcagacactctcacagacgagatcaacttcctgagagccttgtatgatgcagagctgtcccagatgcagacccacatctcagacacatctgtggtgctgtccatggacaacaaccgcaacctggacctggacagcatcatcgctgaggtcaaggcccaatatgaggagattgctcagagaagccgggctgaggctgagtcctggtaccagaccaagtacgaggagctgcaggtcacagcaggcagacatggggacgacctgcgcaacaccaagcaggagattgctgagatcaaccgcatgatccagaggctgagatctgagatcgaccacgtcaagaagcagtgcgccaacctgcaggccgccattgctgatgctgagcagcgtggggagatggccctcaaggatgccaagaacaagctggaagggctggaggatgccctgcagaaggccaagcaggacctggcccggctgctgaaggagtaccaggagctgatgaatgtcaagctggccctggacgtggagatcgccacctaccgcaagctgctggagggtgaggagtgcaggctgaatggcgaaggcgttggacaagtcaacatctctgtggtgcagtccaccgtctccagtggctatggcggtgccagtggtgtcggcagtggcttaggcctgggtggaggaagcagctactcctatggcagtggtcttggcgttggaggtggcttcagttccagcagtggcagagccattgggggtggcctcagctctgttggaggcggcagttccaccatcaagtacaccaccacctcctcctccagcaggaagagctataagcactaagtgcgtctgctagctctcggtcccacagtcctcaggcccctctctggctgcagagccctctcctcaggttgcctgtcctctcctggcctccagtctcccctgctgtcccaggtagagctggggatgaatgcttagtgccctcacttcttctctctctctctataccatctgagcacccattgctcaccatcagatcaacctctgattttacatcatgatgtaatcaccactggagcttcactgttactaaattattaatttcttgcctccagtgttctatctctgaggctgagcattataagaaaatgacctctgctccttttcattgcagaaaattgccaggggcttatttcagaacaacttccacttactttccactggctctcaaactctctaacttataagtgttgtgaacccccacccaggcagtatccatgaaagcacaagtgactagtcctatgatgtacaaagcctgtatctctgtgatgatttctgtgctcttcactctttgcaattgctaaataaa

SEQ ID NO: 169 - DNA, 4755 bp, homo sapiens; identical to SEQ ID NO: 108

SEQ ID NO: 170 - DNA, 1903 bp, homo sapiens
agttgttacatgaaatctgcagtttcataatttccgtgggtcgggccgggcgggccaggcgctgggcacggtgatggccaccactggggccctgggcaactactacgtggactcgttcctgctgggcgccgacgccgcggatgagctgagcgttggccgctatgcgccggggaccctgggccagcctccccggcaggcggcgacgctggccgagcaccccgacttcagcccgtgcagcttccagtccaaggcgacggtgtttggcgcctcgtggaacccagtgcacgcggcgggcgccaacgctgtacccgctgcggtgtaccaccaccatcaccaccacccctacgtgcacccccaggcgcccgtggcggcggcggcgccggacggcagttgatagagaaaaacaacccagcgaaggcgccttctctgaaaacaatgctgagaatgagagcggcggagacaagccccccatcgatcccaataacccagcagccaactggcttcatgcgcgctccactcggaaaaagcggtgcccctatacaaaacaccagaccctggaactggagaaagagtttctgttcaacatgtacctcaccagggaccgcaggtacgaggtggctcgactgctcaacctcaccgagaggcaggtcaagatctggttccagaaccgcaggatgaaaatgaagaaaatcaacaaagaccgagcaaaagacgagtgatgccatttgggcttatttagaaaaaagggtaagctagagagaaaaagaaagaactgtccgtcccccttccgccttctcccttttctcacccccaccctagcctccaccatccccgcacaaagcggctctaaacctcaggccacatcttttccaaggcaaaccctgttcaggctggctcgtaggcctgccgctttgatggaggaggtattgtaagctttccattttctataagaaaaaggaaaagttgaggggggggcattagtgctgatagctgtgtgtgttagcttgtatatatatttttaaaaatctacctgttcctgacttaaaacaaaaggaaagaaactacctttttataatgcacaactgttgatggtaggctgtatagtttttagtctgtgtagttaatttaatttgcagtttgtgcggcagattgctctgccaagatacttgaacactgtgttttattgtggtaattatgttttgtgattcaaacttctgtgtactgggtgatgcacccattgtgattgtggaagatagaattcaatttgaactcaggttgtttatgaggggaaaaaaacagttgcatagagtatagctctgtagtggaatatgtcttctgtataactaggctgttaacctatgattgtaaagtagctgtaagaatttcccagtgaaataaaaaaaaattttaagtgttctcggggatgcatagattcatcattttctccaccttaaaaatgcgggcatttaagtctgtccattatctatatagtcctgtcttgtctattgtatatataatctatatgattaaagaaaatatgcataatcagacaagcttgaatattgtttttgcaccagacgaacagtgaggaaattcggagctatacatatgtgcagaaggttactacctagggtttatgcttaattttaattggaggaaatgaatgctgattgtaacggagttaattttattgataataaattatacactatgaaaccgccattgggctactgtagatttgtatccttgatgaatctggggtttccatcagactgaacttacactgtatattttgcaatagttacctcaaggcctactgaccaaattgttgtgttgagatgatatttaactttttgccaaataaaatatattgattcttttctaaaaaaaaaaaaaaaaaaaa

SEQ ID NO: 171 - DNA, 1484 bp, homo sapiens
cccgtgaggaggaaaaggtgtgtccgctgccacccagtgtgagcgggtgacaccacccggttaggaaatcccagctcccaagagggtataaatccctgctttactgctgagctcctgctggaggtgaaagtctggcctggcagccttccccaggtgagcagcaacaaggccacgtgctgctgggtctcagtcctccacttcccgtgtcctctggaagttgtcaggagcaatgttgcgcttgtacgtgttggtaatgggagtttctgccttcacccttcagcctgcggcacacacaggggctgccagaagctgccggtttcgtgggaggcattacaagcgggagttcaggctggaaggggagcctgtagccctgaggtgcccccaggtgccctactggttgtgggcctctgtcagcccccgcatcaacctgacatggcataaaaatgactctgctaggacggtcccaggagaagaagagacacggatgtgggcccaggacggtgctctgtggcttctgccagccttgcaggaggactctggcacctacgtctgcactactagaaatgcttcttactgtgacaaaatgtccattgagctcagagtttttgagaatacagatgctttcctgccgttcatctcatacccgcaaattttaaccttgtcaacctctggggtattagtatgccctgacctgagtgaattcacccgtgacaaaactgacgtgaagattcaatggtacaaggattctcttcttttggataaagacaatgagaaatttctaagtgtgagggggaccactcacttactcgtacacgatgtggccctggaagatgctggctattaccgctgtgtcctgacatttgcccatgaaggccagcaatacaacatcactaggagtattgagctacgcatcaagaaaaaaaaagaagagaccattcctgtgatcatttcccccctcaagaccatatcagcttctctggggtcaagactgacaatcccgtgtaaggtgtttctgggaaccggcacacccttaaccaccatgctgtggtggacggccaatgacacccacatagagagcgcctacccgggaggccgcgtgaccgaggggccacgccaggaatattcagaaaataatgagaactacattgaagtgccattgatttttgatcctgtcacaagagaggatttgcacatggattttaaatgtgttgtccataataccctgagttttcagacactacgcaccacagtcaaggaagcctcctccacgttctcctggggcattgtgctggccccactttcactggccttcttggttttggggggaatatggatgcacagacggtgcaaacacagaactggaaaagcagatggtctgactgtgctatggcctcatcatcaagactttcaatcctatcccaagtgaaataaatggaatgaaataattcaaacacaaaaaaaaaaaaaaaaaaaaaaaaaaaaaa

SEQ ID NO: 172 - DNA, 1436 bp, homo sapiens
gggatgggagatactgttgtggtcacctctggaaaatacattctgctactcttaaaaactagtgacgctcatacaaatcaacagaaagagcttctgaaggaagactttaaagctgcttctgccacgtgctgctgggtctcagtcctccacttcccgtgtcctctggaagttgtcaggagcaatgttgcgcttgtacgtgttggtaatgggagtttctgccttcacccttcagcctgcggcacacacaggggctgccagaagctgccggtttcgtgggaggcattacaagcgggagttcaggctggaaggggagcctgtagccctgaggtgcccccaggtgccctactggttgtgggcctctgtcagcccccgcatcaacctgacatggcataaaaatgactctgctaggacggtcccaggagaagaagagacacggatgtgggcccaggacggtgctctgtggcttctgccagccttgcaggaggactctggcacctacgtctgcactactagaaatgcttcttactgtgacaaaatgtccattgagctcagagtttttgagaatacagatgctttcctgccgttcatctcatacccgcaaattttaaccttgtcaacctctggggtattagtatgccctgacctgagtgaattcacccgtgacaaaactgacgtgaagattcaatggtacaaggattctcttcttttggataaagacaatgagaaatttctaagtgtgagggggaccactcacttactcgtacacgatgtggccctggaagatgctggctattaccgctgtgtcctgacatttgcccatgaaggccagcaatacaacatcactaggagtattgagctacgcatcaagaaaaaaaaagaagagaccattcctgtgatcatttcccccctcaagaccatatcagcttctctggggtcaagactgacaatcccgtgtaaggtgtttctgggaaccggcacacccttaaccaccatgctgtggtggacggccaatgacacccacatagagagcgcctacccgggaggccgcgtgaccgaggggccacgccaggaatattcagaaaataatgagaactacattgaagtgccattgatttttgatcctgtcacaagagaggatttgcacatggattttaaatgtgttgtccataataccctgagttttcagacactacgcaccacagtcaaggaagcctcctccacgttctcctggggcattgtgctggccccactttcactggccttcttggttttggggggaatatggatgcacagacggtgcaaacacagaactggaaaagcagatggtctgactgtgctatggcctcatcatcaagactttcaatcctatcccaagtgaaataaatggaatgaaataattcaaacacaaaaaaaaaaaaaaaaaaaaaaaaaaaaaa

SEQ ID NO: 173 - DNA, 3183 bp, homo sapiens
ttatactttctgagagtcctggacctcctgtgcgagaacatgaaacatctgtggttcttcttcctcctggtggcagctcccagatgggtcctgtcccaggtgcagctacaggggtcgggcccaagactagtgaagccttcagagaccgtgtccctcacctgcggtgtctctgatgactccatcagtcgcggctattattattggagttggattcgtcagcccgccgggaagggactggagtggattgggcgtgttgcaattactgggaccaccttctataatccttctttcaagggccgagtcaccatttctaaagccagttttagaaaagaaatttccctggagttgaactctctgaccgccgcagacacggccacatatttttgtgcgagagagatgggaccccgacagtggggtttctcgtcgaatgatgcatttgaaatctgggaccacgggattttggtcatcgtctctccagcttccaccaagggcccatcggtcttccccctggcgccctgctccaggagcacctctgggggcacagcggccctgggctgcctggtcaaggactacttccccgaaccggtgacggtgtcgtggaactcaggcgccctgaccagcggcgtgcacaccttcccggctgtcctacagtcctcaggactctactccctcagcagcgtggtgaccgtgccctccagcagcttgggcacccagacctacacctgcaacgtgaatcacaagcccagcaacaccaaggtggacaagagagttgagctcaaaaccccacttggtgacacaactcacacatgcccacggtgcccagagcccaaatcttgtgacacacctcccccgtgcccacggtgcccagagcccaaatcttgtgacacacctcccccatgcccacggtgcccagcacctgaactcctgggaggaccgtcagtcttcctcttccccccaaaacccaaggatacccttatgatttcccggacccctgaggtcacgtgcgtggtggtggacgtgagccacgaagaccccgaggtccagttcaagtggtacgtggacggcgtggaggtgcataatgccaagacaaagccgcgggaggagcagttcaacagcacgttccgtgtggtcagcgtcctcaccgtcctgcaccaggactggctgaacggcaaggagtacaagtgcaaggtctccaacaaagccctcccagcccccatcgagaaaaccatctccaaaaccaaaggacagccccgagaaccacaggtgtacaccctgcccccatcccgggaggagatgaccaagaaccaggtcagcctgacctgcctggtcaaaggcttctaccccagcgacatcgccgtggagtgggagagcagcgggcagccggagaacaactacaacaccacgcctcccatgctggactccgacggctccttcttcctctacagcaagctcaccgtggacaagagcaggtggcagcaggggaacatcttctcatgctccgtgatgcatgaggctctgcacaaccgcttcacgcagaagagcctctccctgtctccggagctgcaactggaggagagctgtgcggaggcgcaggacggggagctggacgggctgtggacgaccatcaccatcttcatcacactcttcctgttaagcgtgtgctacagtgccaccgtcaccttcttcaaggtgaagtggatcttctcctcggtggtggacctgaagcagaccatcatccccgactataggaacatgattgggcagggggcctagggccaccctctgcggggtgtccagggccacccagatcccacacacgagccgtgggccatgctcagccaccacccaggccacacctgcccccgacctcaccgccctcaaccccatggctctctgtctttgcagtcgccctctgagccctgacacgccccccttccagaccctgtgcatagcaggtctaccccagacctccgctgcttggtgcatgcagggagctgggaaccaggtgtcccctcagcaggatgtccctgccctccagaccgccagatgctcacacaaaaggaggcagtgaccagcatccgaggcccccacccaggcaggagctggccctggagccaaccccgtccacgccagcctcctgaacacaggcgtggtttccagatggtgagtgggagcatcagccgccaaggtagggaagccacagcaccatcaggccctgttggggaggcttccgagagctgcgaaggctcactcagacggccttcctcccagcccgcagccagccagcctccattccgggcactcccgtgaactcctgacatgaggaatgaggttgttctgatttcaagcaaagaacgctgctctctggctcctgggaacagtctcggtgccagcaccaccccttggctgcctgcctacactgctggattctcgggtggaactcgacccgcagggacagccagccccagagtccgcactggggagagaaggggccaggcccaggacactgccacctcccacccactccagtccaccgagatcactcagagaagagcctgggccatgtggccactgcaggagccccacagtgcaagggtgaggatagcccaaggaagggctgggcatctgcccagacaggcctcccagagaaggctggtgaccaggtcccaggcgggcaagactcagccttggtggggcctgaggacagaggaggcccaggagcatcggggagagaggtggagggacaccgggagagccaggagcgtggacacagccagaactcatcacagaggctggcgtccagccccgggtcacgtgcagcaggaacaagcagccactctgggggcaccaggtggagaggcaagacgccaaagagggtgcccgtgttcttgcgaaagcggggctgctggccacgagtgctggacagaggcccccacgctctgctgcccccatcacgccgttccgtgactgtcacgcagaatccgcagacaggaagggaggctcgagcgggactgcggccagcgcctgcctcagctgtcagggaggactcccgggctcactcgaaggaggtgccaccatttcagctttggtagcttttcttcttcttttaaattttctaaagctcattaattgtctttgatgtttcttttgtgatgacaataaaatatcctttttaagtcttgt

SEQ ID NO: 174 - DNA, 1524 bp, homo sapiens
cttccctccccgactgtgcgccgcggctggctcgggttcccgggccgacatgggcgccgccgcgtgggcacggccgctgagcgtgtctttcctgctgctgcttctgccgctcccggggatgcctgcgggctcctgggacccggccggttacctgctctactgcccctgcatggggcgctttgggaaccaggccgatcacttcttgggctctctggcatttgcaaagctgctaaaccgtaccttggctgtccctccttggattgagtaccagcatcacaagcctcctttcaccaacctccatgtgtcctaccagaagtacttcaagctggagcccctccaggcttaccatcgggtcatcagcttggaggatttcatggagaagctggcacccacccactggccccctgagaagcgggtggcatactgctttgaggtggcagcccagcgaagcccagataagaagacgtgccccatgaaggaaggaaacccctttggcccattctgggatcagtttcatgtgagtttcaacaagtcggagctttttacaggcatttccttcagtgcttcctacagagaacaatggagccagaggcgtgagaatcactcctgtgttaccttactcttcccaaggtgaaactggaagcagcttctagagaacagcttcaggtgcagaccgagaaatgacgtcatcctgataattattggacgtgtttattaattgcaccccattagcccctgtttttaaaaaatataggttagcaggacgtgggcacaggccgtgaaacatttatagggcgcctgtcacgtgtgagacatagtaatcagaggccaatggtgatgtgtgaaaatgaggatgaccagctctggttttctaggagctatggtctcataatgacaataatcagcatagtgtacttgtccttaatgttatagcatggcaggaaagaccatgggcttagaaggcagacattggttaggaggtgcagggaacatactaattcatgtgcggtcaaagcacttggcatttaatagggcaaaggtaaacagatgtagagaaatgagtctcatgcctgtaatcccagcactttgggaggccaaggtgggtggatcacttgagcctaagagatcaaggctgcagtgagccatgatggtacccctgcactccagcccaggttacagagcaagggcctgtctcagcaaaacaaaacaagcacaggccaaggagtgagatagccagcgctgatggtatctgcctcgtagtgcatgaagtgcatgtcatacactaagcagccagccagtgttggctgtcagtgttattactcacatgctttattttatttaagactttgagatagttcatgaagtgggtattattatcaatttccattttataggtgaggaaactgagcccagtgaagttaaataacttcccaaggtcattgagctgttgagtggacagctcaggtctgtttgtaaatctttaataaataacaacagctaagattcaaaaaaaaaaaaaaaaaa

SEQ ID NO: 175 - DNA, 4999 bp, homo sapiens; identical to SEQ ID NO: 106

SEQ ID NO: 176 - DNA, 770 bp, homo sapiens
ggcacgaggcgcagctccgcggccgccaagccgaggcgggcacggtctccgagtcgcggacgccagctccgagctccctctctccgccgcgcctcctccaggtcgcgccttcgtcgggaccacttcgggcaggagtcgcgtggcgaaggcctgcggccgcggcacaaagttgggggccgcgaagatgaggctgtccccggcgcccctgaagctgagccggactccggcactgctggccctggcgctgcccctggccgcggcgctggccttctccgacgagaccctggacaaagtgcccaagtcagagggctactgcagccgtatcctgcgcgcccagggcacgcggcgcgagggctacaccgagttcagcctccgcgtggagggcgaccccgacttctacaagccgggaaccagctaccgcgtaacactttcagctgctcctccctcctacttcagaggattcacattaattgccctcagagagaacagagagggtgataaggaagaagaccatgctgggaccttccaggaaatctggggctccatgtggcagatctccccagtgaccctccagcgcaggtgcttcaagacaggaagtctaagcagccaccgtttcggtgtatatgctcattatcctaattatgcagcagcaacagcgcctaagagtatcttttcaaatttcaactgaagtcacatgaagacccagatactaacatatggtgataaatgttataaggaaaaataaaggtaataaaaaaaaaaaaaaaaaa

SEQ ID NO: 177 - DNA, 2245 bp, homo sapiens
ctgggcctcaggaagcagcatcggaggtgcctcagccatggcatggatccctctcttcctcggcgtccttgcttactgcacaggatctgtggcctcctatgagctgactcaacccccctcagtgtccgtgtccccaggacagacagccatcatcacctgctctggagataaattgggggataagtattctttctggtatcagcagaagccaggccagtcccctctacttctcgtctatcaagataacaagcgaccctcagggatccctgatcgcttctctggctccaactctgggagcacagccgctctgaccattagcgtagcccagactatggatgaggctgactattattgtcagacgtgggacagaagcactgcggtgttcggcggagggaccaaactgaccgtcctacgtgagtctcttctcccctctccttctccactcttgggacaatgtctgctgattttgtttgtttctgtttgtttctctgtcttgcctcacaaattccccctgcatccccggcctgaacaaggacctccgccctccctgttcagaccctagcttggatttgtttgcttctgtatcttgtctcaacttctggtcatgccttccccctgcatcccaggcctgagcaaggtcctccgccctccctgttcagaccctcccttgcctcaaaaggtcaatagactcacgcagggacagcggactacatagaatgacctactgagcctcgcctgtctgtctttctgtctctctgtttgtctgtctgtctctctgtttgtctctctgtctgtctgacaggcgcaggctgggtctctaagtcttttcctgttatggcattttcagtctgggttcttgtcggaacacctttgaccttgggttatctgacttccatctcctggggaattgggaacatggggtctgagggaggcacctcctgggaggccttagaaggacccagtgccctcggggctgatactcgggaatcacagagctgcggcccagagccaggatccagacccagagtgaggtaggaggtggaggggctgccctgggcgtctgggggctgccagggactgagccctgagccagcctgagactcaggaaaccccgtcaggagggagaaggggaagggtcacaaaaggagagtatgtgacggaggggcgggctcctgggtctcttcagaacatatcccctgtgcccagggagatcagaggggcagagtccactgcgtggaagccccactgctatgaccaggtagccgggacgtggggtggatgccagaaaagactccacggaataagagagagcccaggacagcaggcaggctctccgatccccccaggcccttgccccatacacgggctccagaacacacatttggctggaacaccctgagggaccaaaaggccccagtatcccacagagctgaggagccaggccagaacagtaacctcagagttcgctgtgcaggggagacacagagctctcttaatctgtcaggatggcaagaggggacagggtcagggcgctgagggtcagatgtcggtgttgggggccaaggccccgagagatctcaggacaggtggtcaggtgtctaaggtaaaacagctccccgtgcagatcaggacatagtggaaaacaccctgacccctctgcctggcatagaccttcagacacagagcccctgaacaagggcaccccaacaccacatcatatattgaggtcaggggctccccaggtggacaccaggactctgaccccctgcccctcatccaccccgcaggtcagcccaaggctgccccctcggtcactctgttcccgccctcctctgaggagcttcaagccaacaaggccacactggtgtgtctcataagtgacttctacccgggagccgtgacagtggcctggaaggcagatagcagccccgtcaaggcgggagtggagaccaccacaccctccaaacaaagcaacaacaagtacgcggccagcagctatctgagcctgacgcctgagcagtggaagtcccacagaagctacagctgccaggtcacgcatgaagggagcaccgtggagaagacagtggcccctacagaatgttcataggttctaaaccctcaccccccccacgggagactagagctgcaggatcccaggggaggggtctctcctcccaccccaaggcatcaagcccttctccctgcactcaataaaccctcaataaatattctcattgtcaatcag

SEQ ID NO: 178 - DNA, 1307 bp, homo sapiens
cttcctgtctctccactttctttccctctccgttttggtgggctgaaatgatcctagataattgatagatcctgtggttcaactggatttctagatagaagctggattcatgtgatgccagaggagtaaaatttcaagagactgaaaccagatctgagtttcgctgttccagtctggacctctttggtgctgtaaatcctggatatactgtagatgagtactgcgtttttcttttatggcctctcttcagcttctggagacctcactatcctattatgtctttgtgtgaagacatgctgctttgtaattatcgaaagtgtcgcatcaaactctctggctatgcatgggtcactgcctgctctcacatcttctgtgatcagcatggcagtggtgagtttagtcgctcaccagctatctgtcctgcctgcaacagtaccctttctggaaagctagatattgtccgcacagaactcagtccatcagaggaatataaagctatggtattggcaggactgcgaccagagatcgtgttggacattagctcccgagcgctggccttctggacatatcaggtacatcaggaacgtctctatcaagaatacaatttcagcaaggctgagggccatctgaaacagatggagaagatatatactcagcaaatacaaagcaaggatgtagaattgacctctatgaaaggggaggttacctccatgaagaaagtactagaagaatacaagaaaaagttcagtgacatctctgagaaacttatggagcgcaatcgtcagtatcaaaagctccaaggcctctatgatagccttaggctacgaaacatcactattgctaaccatgaaggcacccttgaaccatccatgattgcacagtctggtgttcttggcttcccattaggtaacaactccaagtttcctttggataatacacctgttcgaaatcggggcgatggagatggagattttcagttcagaccattttttgcgggttctcccacagcacctgaacccagcaacagcttttttagttttgtctctccaagtcgtgaattagagcagcagcaagtttctagcagggccttcaaagtaaaaagaatttgagccacgcatagtgtcacgcacctgtgatcccagctacttaggaggttgaggctgggaggatcacttgagcccaggagtctgaggctttagtgatctaagatcatgccactgcactccagcctgggcaacagagtgagaccctgtttctaaaaaaaaataaagataatttagctaactttaaaaaaaaaaaaaaaaaaa

SEQ ID NO: 179 - DNA, 1681 bp, homo sapiens
tcaggttgaagatgaaatccactgaggagggaagtccagcaccctgtgtgccagtccagaactggcccatctgtagaccccctgaaaatcatatgggcttggatttggatattctcaacagaaagggttaaaggctgatggtacctaaagcctggtacttgaattttgatcaagataagctgccttaagttctcttcattacacaaatgatcctagataattgatagatcctgtggttcaactggatttctagatagaagctggattcatgtgatgccagaggagtaaaatttcaagagactgaaaccagatctgagtttcgctgttccagtctggacctctttggtgctgtaaatcctggatatactgtagatgagtactgcgtttttcttttatgacggagggtcgctcttgttgccgtggctggagtgcaatggtgcgatctcggctcactgcaacctttgcctcgtgggttcaagtgattctcctgcctcagcctcccgagtagctgggattgcaggcgtccaccaccacgcccagctaatttttgtattttagtagagagagggtttcaccgtgttggccacgctggtcgggaactcctgacctcaggcctctcttcagcttctggagacctcactatcctattatgtctttgtgtgaagacatgctgctttgtaattatcgaaagtgtcgcatcaaactctctggctatgcatgggtcactgcctgctctcacatcttctgtgatcagcatggcagtggtgagtttagtcgctcaccagctatctgtcctgcctgcaacagtaccctttctggaaagctagatattgtccgcacagaactcagtccatcagaggaatataaagctatggtattggcaggactgcgaccagagatcgtgttggacattagctcccgagcgctggccttctggacatatcaggtacatcaggaacgtctctatcaagaatacaatttcagcaaggctgagggccatctgaaacagatggagaagatatatactcagcaaatacaaagcaaggatgtagaattgacctctatgaaaggggaggttacctccatgaagaaagtactagaagaatacaagaaaaagttcagtgacatctctgagaaacttatggagcgcaatcgtcagtatcaaaagctccaaggcctctatgatagccttaggctacgaaacatcactattgctaaccatgaaggcacccttgaaccatccatgattgcacagtctggtgttcttggcttcccattaggtaacaactccaagtttcctttggataatacacctgttcgaaatcggggcgatggagatggagattttcagttcagaccattttttgcgggttctcccacagcacctgaacccagcaacagcttttttagttttgtctctccaagtcgtgaattagagcagcagcaagtttctagcagggccttcaaagtaaaaagaatttgagccacgcatagtgtcacgcacctgtgatcccagctacttaggaggttgaggctgggaggatcacttgagcccaggagtctgaggctttagtgatctaagatcatgccactgcactccagcctgggcaacagagtgagaccctgtttctaaaaaaaaataaagataatttagctaactttaaaaaaaaaaaaaaaaaaa

SEQ ID NO: 180 - DNA, 1649 bp, homo sapiens
gtttcaggttgaagatgaaatccactgaggagggaagtccagcaccctgtgtgccagtccagaactggcccatctgtagaccccctgaaaatcatatgggcttggatttggatattctcaacagaaagggttaaaggctgatggtacctaaagcctggtacttgaattttgatcaagataagctgccttaagttctcttcattacacaaatgatcctagataattgatagatcctgtggttcaactggatttctagatagaagctggattcatgtgatgccagaggagtaaaatttcaagagactgaaaccagatctgagtttcgctgttccagtctggacctctttggtgctgtaaatcctggatatactgtagatgagtactgcgtttttcttttatgccggagctgcggcccgcaactccctcagcctggcaggtcccaggatgcttcggggcaaccccacgcatgcgcgctctggcgtagttccctgaagcactcgctcgcagagaatcctggaatcttcgcttgtggagctgtggaggcaacggagtttttccgcgctttttctttcagcctcaggcctctcttcagcttctggagacctcactatcctattatgtctttgtgtgaagacatgctgctttgtaattatcgaaagtgtcgcatcaaactctctggctatgcatgggtcactgcctgctctcacatcttctgtgatcagcatggcagtggtgagtttagtcgctcaccagctatctgtcctgcctgcaacagtaccctttctggaaagctagatattgtccgcacagaactcagtccatcagaggaatataaagctatggtattggcaggactgcgaccagagatcgtgttggacattagctcccgagcgctggccttctggacatatcaggtacatcaggaacgtctctatcaagaatacaatttcagcaaggctgagggccatctgaaacagatggagaagatatatactcagcaaatacaaagcaaggatgtagaattgacctctatgaaaggggaggttacctccatgaagaaagtactagaagaatacaagaaaaagttcagtgacatctctgagaaacttatggagcgcaatcgtcagtatcaaaagctccaaggcctctatgatagccttaggctacgaaacatcactattgctaaccatgaaggcacccttgaaccatccatgattgcacagtctggtgttcttggcttcccattaggtaacaactccaagtttcctttggataatacacctgttcgaaatcggggcgatggagatggagattttcagttcagaccattttttgcgggttctcccacagcacctgaacccagcaacagcttttttagttttgtctctccaagtcgtgaattagagcagcagcaagtttctagcagggccttcaaagtaaaaagaatttgagccacgcatagtgtcacgcacctgtgatcccagctacttaggaggttgaggctgggaggatcacttgagcccaggagtctgaggctttagtgatctaagatcatgccactgcactccagcctgggcaacagagtgagaccctgtttctaaaaaaaaataaagataatttagctaactttaaaaaaaaaaaaaaaaaaa

SEQ ID NO: 181 - DNA, 2086 bp, homo sapiens
atcattcggccctcagactgggctgggcaggtctgagagttagggaaagtccgttcccactgccctcggggagagaagaaaggagggggcaagggagaagctgctggtcggactcacaatgaaaacgctccttcttttgctgctggtgctcctggagctgggagaggcccaaggatcccttcacagggtgcccctcaggaggcatccgtccctcaagaagaagctgcgggcacggagccagctctctgagttctggaaatcccataatttggacatgatccagttcaccgagtcctgctcaatggaccagagtgccaaggaacccctcatcaactacttggatatggaatacttcggcactatctccattggctccccaccacagaacttcactgtcatcttcgacactggctcctccaacctctgggtcccctctgtgtactgcactagcccagcctgcaagacgcacagcaggttccagccttcccagtccagcacatacagccagccaggtcaatctttctccattcagtatggaaccgggagcttgtccgggatcattggagccgaccaagtctctgtggaaggactaaccgtggttggccagcagtttggagaaagtgtcacagagccaggccagacctttgtggatgcagagtttgatggaattctgggcctgggatacccctccttggctgtgggaggagtgactccagtatttgacaacatgatggctcagaacctggtggacttgccgatgttttctgtctacatgagcagtaacccagaaggtggtgcggggagcgagctgatttttggaggctacgaccactcccatttctctgggagcctgaattgggtcccagtcaccaagcaagcttactggcagattgcactggataatatgctgtggagtgtgccaaccttaacgtcatgccggatgtcaccttcaccattaacggagtcccctataccctcagcccaactgcctacaccctactggacttcgtggatggaatgcagttctgcagcagtggctttcaaggacttgacatccaccctccagctgggcccctctggatcctgggggatgtcttcattcgacagttttactcagtctttgaccgtgggaataaccgtgtgggactggccccagcagtcccctaaggaggggccttgtgtctgtgcctgcctgtctgacagaccttgaatatgttaggctggggcattctttacacctacaaaaagttattttccagagaatgtagctgtttccagggttgcaacttgaattaagaccaaacagaacatgagaatacacacacacacacacatatacacacacacacacttcacacatacacaccactcccaccaccgtcatgatggaggaattacgttatacattcatattttgtattgatttttgattatgaaaatcaaaaattttcacatttgattatgaaaatctccaaacatatgcacaagcagagatcatggtataataaatccctttgcaactccactcagccctgacaacccatccacacacggccaggcctgtttatctacactgctgcccactcctctctccagctccacatgctgtacctggatcattctgaagcaaattccgagcattacatcattttgtccataaatatttctaacatccttaaatatacaatcggaattcaagcatctcccattgtcccacaaatgtttggctgtttttgtagttggattgtttgtattaggattcaagcaaggcccatatattgcatttatttgaaatgtctgtaagtctctttccatctacagagtttagcacatttgaacgttgctggttgaaatcccgaggtgtcatttgacatggttctctgaacttatctttcctataaaatggtagttagatctggaggtctgattttgtggcaaaaatacttcctaggtggtgctgggtacttcttgttgcatcctgtcaggaggcagataatgctggtgcctctctattggtaatgttaagactgctgggtgggtttggagttcttggctttaatcattcattacaaagttcagcatttta

1. A method for
(a) detecting a colorectal carcinoma;
(b) predicting metastases dependent on a primary colorectal carcinoma; or
(c) predicting the response of metastases to a 5-fluorouracil-containing chemotherapy;
comprising determining the gene expression profile of at least one marker gene selected from the group consisting of: SEQ ID NOs: 1-181 and combinations thereof.

2. The method according to claim 1, in which the expression profiles of at least two of the marker genes are determined and compared with a reference.

3. The method for detecting a colorectal carcinoma according to claim 1, in which the expression levels of at least two of the marker genes are determined and compared with the average expression levels of the genes from normal intestinal mucosa.

4. The method for detecting a colorectal carcinoma according to claim 1, in which the expression profiles of at least two marker genes selected from the group consisting of: SEQ ID NOs: 1-72 and SEQ ID NOs: 121-156, and combinations thereof, are determined.

5. The method for detecting a colorectal carcinoma according to claim 1, in which the expression profiles of at least two marker genes selected from the group consisting of: SEQ ID NOs: 10, 14, 25, 41, 52, 63, 68, 73-120, 136, 137, 138, 153, 154, 155 and 157-181, and combinations thereof, are determined.

6. The method for detecting a colorectal carcinoma according to claim 1, in which the expression profiles of at least two marker genes selected from the group consisting of: SEQ ID NOs: 2, 7, 8, 12, 19, 21, 25, 33, 38, 41, 45, 49, 50, 51, 54, 66, 68, 70, 78, 83, 85, 86, 92, 99, 101, 103, 104, 105, 109, 112, 114, 115, 118, 122, 124, 136-140, 157, 159-162, 170, 171, 172, 174 and 177-180, and combinations thereof, are determined.

7. The method for detecting a colorectal carcinoma according to claim 1, in which the expression profiles of at least two marker genes selected from the group consisting of: SEQ ID NOs: 2, 7, 8, 12, 19, 21, 25, 33, 38, 41, 45, 49, 50, 51, 54, 66, 68, 70, 122, 124 and 136-140, and combinations thereof, are determined.

8. The method for detecting a colorectal carcinoma according to claim 1, in which the expression profiles of at least two marker genes selected from the group consisting of: SEQ ID NOs: 25, 41, 68, 78, 83, 85, 86, 92, 99, 101, 103, 104, 105, 109, 112, 114, 115, 118, 136-138, 157, 159-162, 170-172, 174 and 177-180, and combinations thereof, are determined.

9. The method for detecting a colorectal carcinoma according to claim 1, in which the expression profile of at least one of the three marker genes selected from the group consisting of: SEQ ID NOs: 25, 41, 68 and 136-138, and combinations thereof, is determined.

10. The method for predicting metastases dependent on a primary colorectal carcinoma according to claim 1, in which the expression levels or expression profiles in a sample of a primary colorectal carcinoma of at least two genes selected from the group consisting of: SEQ ID NOs: 1-181 are determined and compared with the expression levels in liver metastases, liver tissue, or both.

11. The method for predicting metastases dependent on a primary colorectal carcinoma according to claim 1, in which the expression profiles of at least two marker genes selected from the group consisting of: SEQ ID NOs: 1-72 or 121-156, and combinations thereof, are determined.

12. The method for predicting metastases dependent on a primary carcinoma according to claim 1, in which the expression profiles of at least two marker genes selected from the group consisting of: SEQ ID NOs: 10, 14, 25, 41, 52, 63, 68, 73-120, 136, 137, 138, 153, 154, 155 and 157-181, and combinations thereof, are determined.

13. The method for predicting metastases dependent on a primary colorectal carcinoma according to claim 1, in which the expression profiles of at least two marker genes selected from the group consisting of: SEQ ID NOs: 17, 19, 20, 22, 26, 29, 30, 31, 33, 35, 37, 40, 48, 58, 59, 64, 66, 69, 71, 72, 74, 109, 125, 133, 134, 135, 151, 152 and 177, and combinations thereof, are determined.

14. The method for predicting metastases dependent on a primary colorectal carcinoma according to claim 1, in which the expression profiles of at least two marker genes selected from the group consisting of: SEQ ID NOs: 17, 19, 20, 22, 26, 29, 30, 31, 33, 35, 37, 40, 48, 58, 59, 64, 66, 69, 71, 72, 125, 133, 134, 135, 151, 152 and 156, and combinations thereof, are determined.

15. The method for predicting metastases dependent on a primary colorectal carcinoma according to claim 1, in which the expression profiles of at least one of the two marker genes selected from the group consisting of: SEQ ID NOs: 74, 109 and 177, and combinations thereof, are determined.

16. The method for predicting the response of metastases to a 5-fluorouracil-containing chemotherapy according to claim 1, in which the expression levels, expression profiles, or both, in a sample of a metastasis of at least two of the 120 genes selected from the group consisting of: SEQ ID NO: 1-181 and combinations thereof, is determined and compared with the expression levels, expression profiles, or both, of responders, non-responders, or both.

17. The method for predicting the response of metastases to a 5-fluorouracil-containing chemotherapy according to claim 1, in which the expression profiles of at least two marker genes selected from the group consisting of: SEQ ID NOs: 1-72 or 121-156, and combinations thereof, are determined.

18. The method for predicting the response of metastases to a 5-fluorouracil-containing chemotherapy according to claim 1, in which the expression profiles of at least two marker genes selected from the group consisting of: SEQ ID NOs. 10, 14, 25, 41, 52, 63, 73-120, 136, 137, 138, 153, 154, 155, and 157-181, and combinations thereof, are determined.

19. The method for predicting the response of metastases to a 5-fluorouracil-containing chemotherapy according to claim 1, in which the expression profiles of at least two marker genes selected from the group consisting of: SEQ ID NOs: 6, 7, 8, 10, 13, 14, 24, 25, 41, 45, 46, 48, 52, 54, 60, 61, 63, 65, 66, 68, 73, 78, 79, 80, 89, 97, 98, 101, 104, 107, 108, 116, 117, 120, 122, 136-147, 151-155, 157, 167, 168, 169, 171, 172, 176 and 181, and combinations thereof, are determined.

20. The method for predicting the response of metastases to a 5-fluorouracil-containing chemotherapy according to claim 1, in which the expression profiles of at least two marker genes selected from the group consisting of: SEQ ID NOs: 6, 7, 8, 13, 24, 45, 46, 48, 52, 54, 60, 61, 65, 66, 73, 78, 79, 80, 89, 97, 98, 101, 104, 107, 108, 116, 117, 120, 122, 139-147, 151, 152, 157, 167, 168, 169, 171, 172, 176 and 181, and combinations thereof, are determined.

21. The method for predicting the response of metastases to a 5-fluorouracil-containing chemotherapy according to claim 1, in which the expression profiles of at least one marker gene selected from the group consisting of: SEQ ID NOs: 10, 14, 25, 41, 52, 63, 68, 136, 137, 138, 153, 154, 155, and combinations thereof, are determined.

22. The method according to claim 1, in which the determination of the gene expression profile comprises the determination of at least one marker gene which is at least 60% identical with one of the marker genes selected from the group consisting of: SEQ ID NOs: 1-120.

23. The method according to claim 1, wherein the expression profile of the marker genes is obtained from a sample from the patient.

24. The method according to claim 23, wherein the sample is selected from the group consisting of a tissue biopsy, peritoneal fluid, blood, urine, serum and stool, and combinations thereof.

25. The method according to claim 23, wherein the expression profile of the marker genes is determined by the measurement of the quantity of marker gene mRNA.

26. The method according to claim 25, wherein the quantity of marker gene mRNA is determined by gene chip technology, RT-PCR, Northern hybridization, dot blotting, in situ hybridization, or combinations thereof.

27. The method according to claim 23, wherein the expression profile of the marker gene is determined by the measurement of the quantity of a polypeptide encoded by the marker gene.

28. The method according to claim 27, wherein the quantity of polypeptide encoded by the marker gene is determined by ELISA, RIA, immuno-blotting, FACS, immunohistochemical methods, or combinations thereof.

29. The method according to claim 1, which comprises further comprising the following steps:
(a) determination of the gene expression profile as defined in claim 1 in a patient sample; and
(b) determination, with the help of the gene expression profile determined in step (a), whether the patient
i. suffers from a colorectal carcinoma;
ii. presents metastases subsequent to a colorectal carcinoma;
iii. responds to 5-FU-containing chemotherapy of the metastases, or combinations thereof.

30. A kit for carrying out the method according to claim 1, which kit comprises specific nucleotide probes, primer pairs, antibodies, aptamers, and combinations thereof for the determination of at least two of marker genes which are selected from the group consisting of: SEQ ID NO: 1-181, and combinations thereof, or for the determination of at least two gene products coded for by the marker genes which are selected from the group consisting of: SEQ ID NO: 1-181, and combinations thereof.

31. The kit according to claim 30, which kit is a diagnostic kit.

32. A method to determine whether the patient
(a) suffers from a colorectal carcinoma;
(b) presents metastases subsequent to a colorectal carcinoma;
(c) responds to 5-FU-containing chemotherapy of the metastases, or combinations thereof, comprising:
detecting one of more of the marker genes selected from the group consisting of: SEQ ID NO: 1 to 181, and combinations thereof.

33. A method of screening for drugs comprising screening a transgenic non-human animal which overexpresses or underexpresses one or more of the marker genes of claim 1.

34. A method of screening for drugs comprising screening a transgenic cell which overexpresses or underexpresses one or more of the marker genes of claim 1.

35. The method of claim 33 or 34, wherein a drug identified by the screen is used to treat colorectal carcinoma, metastases, or both.

36. The method according to claim 1, where the metastases are liver metastases.
